(19) United States
(12) Patent Application Publication
(10) Pub. No.: US 2024/0084035 A1
(43) Pub. Date: Mar. 14, 2024

(54) COMBINATION THERAPY WITH IMMUNE CELL ENGAGING PROTEINS AND IMMUNOMODULATORS

(71) Applicant: Harpoon Therapeutics, Inc., South San Francisco, CA (US)

(72) Inventors: Mary Ellen MOLLOY, San Francisco, CA (US); Che-Leung LAW, Shoreline, WA (US); Richard J. AUSTIN, San Francisco, CA (US); Bryan D. LEMON, Mountain View, CA (US); Holger WESCHE, San Francisco, CA (US); Wade H. AARON, San Mateo, CA (US)

(21) Appl. No.: 18/457,177

(22) Filed: Aug. 28, 2023

Related U.S. Application Data
(63) Continuation of application No. PCT/US22/19302, filed on Mar. 8, 2022.
(60) Provisional application No. 63/158,721, filed on Mar. 9, 2021.

(51) Int. Cl. C07K 16/30; A61P 35/00; C07K 16/28; C07K 16/40

(52) U.S. Cl. CPC C07K 16/3069; A61P 35/00; C07K 16/2809; C07K 16/2827; C07K 16/2863; C07K 16/2878; C07K 16/3023; C07K 16/40; A61K 2039/507

(57) ABSTRACT

Provided herein are combinations or compositions comprising immunomodulators and immune cell engaging proteins. Also provided herein are methods of use thereof, such as methods of treatment by administering the combinations or compositions comprising immunomodulators and immune cell engaging proteins to a subject. The method may be used to treat a cancer in the subject.

### CROSS-REFERENCE

[0001] This application is a continuation of International Application No. PCT/US2022/019302, filed Mar. 8, 2022, which claims the benefit of U.S. Provisional Application No. 63/158,721 filed Mar. 9, 2021, each of which is incorporated by reference herein in its entirety.

### SEQUENCE LISTING

[0002] The instant application contains a Sequence Listing which has been submitted electronically in XML file format and is hereby incorporated by reference in its entirety. Said XML copy, created on Aug. 22, 2023, is named 47517-751_301_SL.xml and is 4,731,900 bytes in size.

### INCORPORATION BY REFERENCE

[0003] All publications, patents, and patent applications mentioned in this specification are herein incorporated by reference to the same extent as if each individual publication, patent, or patent application was specifically and individually indicated to be incorporated by reference.

### BACKGROUND

[0004] Cancer is the second leading cause of human death next to coronary disease. Worldwide, millions of people die from cancer every year. In the United States alone, cancer causes the death of well over a half-million people each year, with some 1.4 million new cases diagnosed per year. While deaths from heart disease have been declining significantly, those resulting from cancer generally are on the rise. In the early part of the next century, cancer is predicted to become the leading cause of death.

[0005] Moreover, even for those cancer patients that initially survive their primary cancers, common experience has shown that their lives are dramatically altered. Many cancer patients experience strong anxieties driven by the awareness of the potential for recurrence or treatment failure. Many cancer patients experience significant physical debilitations following treatment.

[0006] Generally speaking, the fundamental problem in the management of the deadliest cancers is the lack of effective and non-toxic systemic therapies. Cancer is a complex disease characterized by genetic mutations that lead to uncontrolled cell growth. Cancerous cells are present in all organisms and, under normal circumstances, their excessive growth is tightly regulated by various physiological factors.

[0007] The selective destruction of an individual cell or a specific cell type is often desirable in a variety of clinical settings. For example, it is a primary goal of cancer therapy to specifically destroy tumor cells, while leaving healthy cells and tissues intact and undamaged. One such method is by inducing an immune response against the tumor, to make immune effector cells such as natural killer (NK) cells or cytotoxic T lymphocytes (CTLs) attack and destroy tumor cells.

### SUMMARY OF THE INVENTION

[0008] Provided herein is a combination comprising an immunomodulator and a half-life extended immune cell engaging protein. In some embodiments, the half-life extended immune cell engaging protein comprises an immune cell engaging domain. In some embodiments, the immune cell engaging domain comprises a natural killer (NK) cell engaging domain, a T cell engaging domain, a B cell engaging domain, a dendritic cell engaging domain, a macrophage cell engaging domain, or a combination thereof. In some embodiments, the immune cell engaging domain comprises the T cell engaging domain. In some embodiments, the T cell engaging domain binds a CD3 molecule. In some embodiments, the CD3 molecule is at least one of: a CD3γ molecule, a CD3δ molecule, or a CD3ε molecule.

[0009] In some embodiments, the immunomodulator comprises an immunostimulatory antibody agonist of a co-stimulatory receptor. In some embodiments, the immunomodulator comprises an immune checkpoint modulator. In some embodiments, the immune checkpoint modulator is an antagonist of at least one of: programmed cell death 1 (PDCD1, PD1, PD-1), CD274 (CD274, PDL1, PD-L1), PD-L2, cytotoxic T-lymphocyte associated protein 4 (CTLA4, CD152), CD276 (B7H3); V-set domain containing T cell activation inhibitor 1 (VTCN1, B7H4), CD272 (B and T lymphocyte associated (BTLA)), killer cell immunoglobulin like receptor, three Ig domains and long cytoplasmic tail 1 (KIR, CD158E1), lymphocyte activating 3 (LAG3, CD223), hepatitis A virus cellular receptor 2 (HAVCR2, TIMD3, TIM3), V-set immunoregulatory receptor (VSIR, B7H5, VISTA), T cell immunoreceptor with Ig and ITIM domains (TIGIT), programmed cell death 1 ligand 2 (PDCDILG2, PD-L2, CD273), immunoglobulin superfamily member 11 (IGSF11, VSIG3), TNFRSF14 (HVEM, CD270), TNFSF14 (HVEML), PVR related immunoglobulin domain containing (PVRIG, CD112R), galectin 9 (LGALS9), killer cell immunoglobulin like receptor, two Ig domains and long cytoplasmic tail 1 (KIR2DL1); killer cell immunoglobulin like receptor, two Ig domains and long cytoplasmic tail 2 (KIR2DL2); killer cell immunoglobulin like receptor, two Ig domains and long cytoplasmic tail 3 (KIR2DL3); and killer cell immunoglobulin like receptor, three Ig domains and long cytoplasmic tail 1 (KIR3DL1), killer cell lectin like receptor C1 (KLRC1, NKG2A, CD159A), killer cell lectin like receptor D1 (KLRD1, CD94), killer cell lectin like receptor G1 (KLRG1, CLEC15A, MAFA, 2F1), sialic acid binding Ig like lectin 7 (SIGLEC7), SIGLEC, sialic acid binding Ig like lectin 9 (SIGLEC9), CEACAM (e.g., CEACAM-1, CEACAM-3 and/or CEACAM-5), VISTA, LAIR1, CD160, 2B4, CD80, CD86, B7-H1, B7-H3 (CD276), B7-H4 (VTCN1), HVEM (TNFRSF14 or CD270), KIR, A2AR, A2BR, MHC class I, MHC class II, GAL9, adenosine, TGFR (e.g., TGFR beta), CD94/NKG2A, IDO, TDO, CD39, CD73, GARP, CD47, PVRIG, CSF1R, and NOX, or any combination thereof.

[0010] In some embodiments, the immune checkpoint modulator is an antagonist of PD-1 and is selected from the group consisting of. Pembrolizumab (humanized antibody), Pidilizumab (CT-011, monoclonal antibody, binds DLL1 and PD-1), Spartalizumab (PDR001, monoclonal antibody), Nivolumab (BMS-936558, MDX-1106, human IgG4 monoclonal antibody), MEDI0680 (AMP-514, monoclonal antibody), Cemiplimab (REGN2810, monoclonal antibody), Dostarlimab (TSR-042, monoclonal antibody), Sasanlimab (PF-06801591, monoclonal antibody), Tislelizumab (BGB-A317, monoclonal antibody), BGB-108 (antibody), Tislelizumab (BGB-A317, antibody), Camrelizumab (INCSHR1210, SHR-1210), AMP-224, Zimberelimab (AB122, GLS-010, WBP-3055, monoclonal antibody), AK-103 (HX-008, monoclonal antibody), AK-105 (anti-PD-1 antibody), CS1003 (monoclonal antibody), HLX10 (monoclonal antibody), Retifanlimab (MGA-012, anti-PD-1 monoclonal antibody), BI-754091 (antibody), Balstilimab (AGEN2034, PD-1 antibody), toripalimab (JS-001, antibody), cetrelimab (JNJ-63723283, anti-PD-1 antibody), genolimzumab (CBT-501, anti-PD-1 antibody), LZM009 (anti-PD-1 monoclonal antibody), Prolgolimab (BCD-100, anti-PD-1 monoclonal antibody), Sym021 (antibody), ABBV-181 (antibody), BAT-1306 (antibody), JTX-4014, sintilimab (IBI-308), Tebotelimab (MGD013, PD-1/LAG-3 bispecific), MGD-019 (PD-1/CTLA4 bispecific antibody), KN-046 (PD-1/CTLA4 bispecific antibody), MEDI-5752 (CTLA4/PD-1 bispecific antibody), RO7121661 (PD-1/TIM-3 bispecific antibody), XmAb207I7 (PD-1/CTLA4 bispecific antibody), and AK-104 (CTLA4/PD-1 bispecific antibody).

[0011] In some embodiments, the immune checkpoint modulator is Pembrolizumab. In some embodiments, the immune checkpoint modulator is an antibody that binds to PD-L1 and is selected from the group consisting of Atezolizumab (MPDL3280A, monoclonal antibody), Avelumab (MSB0010718C, monoclonal antibody), Durvalumab (MEDI-4736, human immunoglobulin G1 kappa (IgG1κ) monoclonal antibody), Envafolimab (KN035, single-domain PD-L1 antibody), AUNP12, CA-170 (small molecule targeting PD-L1 and VISTA), BMS-986189 (macrocyclic peptide), BMS-936559 (Anti-PD-L1 antibody), Cosibelimab (CK-301, monoclonal antibody), LY3300054 (antibody), CX-072 (antibody), CBT-502 (antibody), MSB-2311 (antibody), BGB-A333 (antibody), SHR-1316 (antibody), CS1001 (WBP3155, antibody), HLX-20 (antibody), KL-A167 (HBM 9167, antibody), STI-A1014 (antibody), STI-A1015 (IMC-001, antibody), BCD-135 (monoclonal antibody), FAZ-053 (antibody), CBT-502 (TQB2450, antibody), MDX1105-01 (antibody), FS-118 (LAG-3/PD-L1, bispecific antibody), M7824 (anti-PD-L1/TGF-β receptor II fusion protein), CDX-527 (CD27/PD-L1 bispecific antibody), LY3415244 (TIM3/PD-L1 bispecific antibody), INBRX-105 (4-1BB/PD-L1 bispecific antibody).

[0012] In some embodiments, the immune checkpoint modulator is Atezolizumab. In some embodiments, the immune checkpoint modulator is an anti-CD39 antibody. In some embodiments, the anti-CD39 antibody is IPH5201. In some embodiments, the immune checkpoint modulator is an anti-CD73 antibody. In some embodiments, the anti-CD73 antibody is IPH5301. In some embodiments, the immunomodulator is an inhibitor of at least one of: A2AR, CD39, or CD73. In some embodiments, the inhibitor is a small molecule inhibitor. In some embodiments, the immune checkpoint modulator comprises an immune checkpoint activator. In some embodiments, the immune checkpoint activator is an agonist of CD27, CD70, CD40, CD40LG, TNF receptor superfamily member 4 (TNFRSF4, OX40); TNF superfamily member 4 (TNFSF4, OX40L), GITR (TNF receptor superfamily member 18, TNFRSF18, CD357), TNFSF18 (GITRL), CD137 (TNFRSF9, tumor necrosis factor receptor superfamily member 9, 4-1BB, ILA, induced by lymphocyte activation), CD137L (TNFSF9), CD28, CD278 (inducible T cell co-stimulator, ICOS), inducible T cell co-stimulator ligand (ICOSLG, B7H2), CD80 (B7-1), nectin cell adhesion molecule 2 (NECTIN2, CD112), CD226 (DNAM-1), Poliovirus receptor (PVR) cell adhesion molecule (PVR, CD155), CD16, killer cell lectin like receptor K1 (KLRKI1, NKG2D, CD314), or SLAM family member 7 (SLAMF7). In some embodiments, the agonist is an antibody or an antigen-binding fragment thereof.

[0013] In some embodiments, the half-life extended immune cell engaging protein comprises a first domain (A), a second domain (B), and a third domain (D), wherein (i) the first domain (A) is the T cell engaging domain and specifically binds to human CD3, (ii) the second domain (B) specifically binds to human serum albumin (HSA), and (iii) the third domain (C) specifically binds to a target antigen; wherein the domains are linked in one of the following orders: H₂N-(C)-(B)-(A)-COOH, H₂N-(A)-(B)-(C)-COOH, H₂N-(B)-(A)-(C)-COOH, H₂N-(C)-(A)-(B)-COOH, H₂N-(A)-(C)-(B)-COOH, H₂N-(B)-(C)-(A)-COOH, or by linkers L1 and L2 in one of the following orders: H₂N-(C)-L1-(B)-L2(A)-COOH, H₂N-(A)-L1-(B)-L2-(C)-COOH, H₂N-(B)-L1-(A)-L2-(C)-COOH, H₂N-(C)-L1-(A)-L2-(B)-COOH, H₂N-(A)-L1-(C)-L2(B)-COOH, H₂N-(B)-L1-(C)-L2-(A)-COOH.

[0014] In some embodiments, target antigen in a tumor antigen. In some embodiments, the third domain specifically binds to a target antigen selected from the group consisting of: CD19 (B-lymphocyte antigen CD19, B-Lymphocyte Surface Antigen B4, T-Cell Surface Antigen Leu-12, CVID3), PSMA (prostate specific membrane antigen), MSLN (mesothelin), BCMA (B-cell maturation antigen), DLL3 (Delta-like ligand 3), EGFR (epidermal growth factor receptor), FLT3 (FMS-like tyrosine kinase 3), CD20 (B-lymphocyte antigen CD20, MS4A1, B1, Bp35, CVID5, LEU-16, MS4A2, S7, membrane spanning 4-domains A1), CD22 (SIGLEC-2, SIGLEC2), CD25 (IL2RA, interleukin-2 receptor alpha chain), CD27 (S152, S152. LPFS2, T14, TNFRSF7, Tp55), CD30 (TNFRSF8), CD33 (Siglec-3, sialic acid binding Ig-like lectin 3, SIGLEC3, SIGLEC-3, gp67, p67), CD37 (GP52-40, TSPAN26), CD38 (cyclic ADP ribose hydrolase, ADPRC1, ADPRC 1), CD40 (Bp50, CDW40, TNFRSF5, p50), CD44 (HCAM, homing cell adhesion molecule), Pgp-1 (phagocytic glycoprotein-1), Hermes antigen, lymphocyte homing receptor, ECM-III, and HUTCH-1), CD48 (BLAST-1, B-lymphocyte activation marker, SLAMF2, signaling lymphocytic activation molecule 2), CD52 (CAMPATH-1 antigen), CD70, CD73 (NT5E, ecto-5′-nucleotidase), CD39 (ENTPD1, Ectonucleoside triphosphate diphosphohydrolase-1), CD74 (HLA class II histocompatibility antigen gamma chain, HLA-DR antigens-associated invariant chain), CD79b (immunoglobulin-associated beta), CD80 (B7-1), CD86 (B7-2), CD123 (IL3RA, interleukin-3 receptor), CD133 (PROM1), CD137 (TNFRSF9, tumor necrosis factor receptor superfamily member 9, 4-1BB, ILA, induced by lymphocyte activation), CD138 (SDC1), alpha fetoprotein (AFP), c-Met; c-Kit; CD371 (CLEC12A, C-type lectin domain family 12 member A, CLL1)); CD370 (CLEC9A, C-type lectin domain containing 9A); cadherin 3 (CDH3, p-cadherin, PCAD); carbonic anhydrase 6 (CA6); carbonic anhydrase 9 (CA9, CAIX); carcinoembryonic antigen related cell adhesion molecule 3 (CEACAM3); carcinoembryonic antigen related cell adhesion molecule 5 (CEACAM5); CD66c (CEACAM6, carcinoembryonic antigen related cell adhesion molecule 6); chorionic somatomammotropin hormone 1 (CSH1, CS1); coagulation factor III, tissue factor (F3, TF); collectin subfamily member 10 (COLEC10); delta like canonical Notch ligand 3 (DLL3); ectonucleotide pyrophosphatase/phosphodiesterase 3 (ENPP3); ephrin A1 (EFNA1); epidermal growth factor receptor (EGFR); EGFR variant III (EGFRvIII); EPH receptor A2 (EPHA2); epithelial cell adhesion molecule (EPCAM); erb-b2 receptor tyrosine kinase 2 (ERBB2, HER2); fibroblast activation protein alpha (FAP); fibroblast growth factor receptor 2 (FGFR2); fibroblast growth factor receptor 3 (FGFR3); folate hydrolase 1 (FOLH1, PSMA); folate receptor 1 (FOLR1, FRa); GD2 ganglioside; glycoprotein NMB (GPNMB, osteoactivin); guanylate cyclase 2C (GUCY2C, GCC); human papillomavirus (HPV) E6; HPV E7; major histocompatibility complex (MHC) class I-presented neoantigens, major histocompatibility complex (MHC) class II-presented neoantigens, major histocompatibility complex, class I, E (HLA-E); major histocompatibility complex, class I, F (HLA-F); major histocompatibility complex, class I, G (HLA-G, MHC-G); integrin subunit beta 7 (ITGB7); leukocyte immunoglobulin like receptor B1 (LILRB1, ILT2); leukocyte immunoglobulin like receptor B2 (LILRB2, ILT4); LY6/PLAUR domain containing 3 (LYPD3, C4.4A); glypican 3 (GPC3); KRAS proto-oncogene, GTPase (KRAS); MAGE family member A1 (MAGEA1); MAGE family member A3 (MAGEA3); MAGE family member A4 (MAGEA4); MAGE family member A11 (MAGEA11); MAGE family member C1 (MAGEC1); MAGE family member C2 (MAGEC2); MAGE family member D1 (MAGED1); MAGE family member D2 (MAGED2); mesothelin (MSLN); mucin 1 (MUC1) and splice variants thereof (e.g., MUC1/C, D, and Z); mucin 16 (MUC16); necdin (NDN); nectin cell adhesion molecule 4 (NECTIN4); SLIT and NTRK like family member 6 (SLITRK6); promyelocytic leukemia (PML, TRIM19); protein tyrosine kinase 7 (inactive) (PTK7); CD352 (SLAMF6, SLAM family member 6); CD319 (SLAMF7, SLAM family member 7, 19A, CRACC, CS1); sialic acid binding Ig like lectin 7 (SIGLEC7); sialic acid binding Ig like lectin 9 (SIGLEC9); solute carrier family 34 (sodium phosphate), member 2 (SLC34A2); solute carrier family 39 member 6 (SLC39A6, LIV1); STEAP family member 1 (STEAP1); STEAP family member 2 (STEAP2); CD134 (TNFRSF4, TNF receptor superfamily member 4, OX40); CD137L (TNFSF9, TNF superfamily member 9, 4-1BB-L); CD261 (TNFRSF10A, TNF receptor superfamily member 10a, DR4, TRAILR1); CD262 (TNFRSF10B, TNF receptor superfamily member 10b, DR5, TRAILR2); CD267 (TNFRSF13B, TNF receptor superfamily member 13B, TACI, IGAD2); CD269 (TNFRSF17, TNF receptor superfamily member 17, BCMA,); CD357 (TNFRSF18, TNF receptor superfamily member 18 GITR); transferrin (TF); transforming growth factor beta 1 (TGFB1); trophoblast glycoprotein (TPBG, 5T4); trophinin (TRO, MAGED3); tumor associated calcium signal transducer 2 (TACSTD2, TROP2, EGP1); Fucosyl GM1; Sialyl Lewis adhesion molecule (sLe); ROR1; CD30; and Lewis Y antigen.

[0015] In some embodiments, the third domain is a single domain antibody that specifically binds to PSMA. In some embodiments, the third domain comprises a CDR1 comprising an amino acid sequence selected from the group consisting of SEQ ID NOS: 462-465, a CDR2 comprising an amino acid sequence selected from the group consisting of SEQ ID NOS: 466-472, and a CDR3 comprising an amino acid sequence selected from the group consisting of SEQ ID NOS: 474-475. In some embodiments, the CDR1 comprises the amino acid sequence of SEQ ID NO: 462, the CDR2 comprises the amino acid of SEQ ID NO: 473, and the CDR3 comprises the amino acid sequence of SEQ ID NO: 474. In some embodiments, the third domain comprises an amino acid sequence selected from the group consisting of SEQ ID NOS: 476-489. In some embodiments, the third domain comprises the amino acid sequence of SEQ ID NO: 489.

[0016] In some embodiments, the third domain is a single domain antibody that specifically binds to MSLN. In some embodiments, the third domain comprises a CDR1 comprising an amino acid sequence selected from the group consisting of SEQ ID NOS: 490-528, a CDR2 comprising an amino acid selected from the group consisting of SEQ ID NOS: 529-567, and a CDR3 comprising an amino acid selected from the group consisting of SEQ ID NOS: 568-606. In some embodiments, the CDR1 comprises the amino acid sequence of SEQ ID NO: 523, the CDR2 comprises the amino acid of SEQ ID NO: 562, and the CDR3 comprises the amino acid sequence of SEQ ID NO: 601. In some embodiments, the third domain comprises an amino acid sequence selected from the group consisting of SEQ ID NOS: 607-650. In some embodiments, the third domain comprises the amino acid sequence of SEQ ID NO: 647. In some embodiments, the third domain is a single domain antibody that specifically binds to BCMA. In some embodiments, the third domain CDR1 comprises comprising an amino acid selected from the group consisting of SEQ ID NOS: 1-115, a CDR2 comprising an amino acid selected from the group consisting of SEQ ID NOS: 116-230, and a CDR3 comprising an amino acid selected from the group consisting of SEQ ID NOS: 231-345. In some embodiments, the CDR1 comprises the amino acid sequence of SEQ ID NO: 73, the CDR2 comprises the amino acid of SEQ ID NO: 188, and the CDR3 comprises the amino acid sequence of SEQ ID NO: 303. In some embodiments, the third domain comprises an amino acid sequence selected from the group consisting of SEQ ID NOS: 346-461. In some embodiments, the third domain comprises the amino acid sequence of SEQ ID NO: 383.

[0017] In some embodiments, the third domain is a single domain antibody that specifically binds to DLL3. In some embodiments, the third domain comprises a CDR1 comprising an amino acid selected from the group consisting of SEQ ID NOS: 1751-2193, a CDR2 comprising an amino acid selected from the group consisting of SEQ ID NOS: 2194-2636, and a CDR3 comprising an amino acid selected from the group consisting of SEQ ID NOS: 2637-3080. In some embodiments, the CDR1 comprises the amino acid sequence of SEQ ID NO: 2182, the CDR2 comprises the amino acid of SEQ ID NO: 2625, and the CDR3 comprises the amino acid sequence of SEQ ID NO: 3069. In some embodiments, the third domain comprises an amino acid sequence selected from the group consisting of SEQ ID NOS: 1308-1750. In some embodiments, the third domain comprises the amino acid sequence of SEQ ID NO: 1739. In some embodiments, the third domain is a single domain antibody that specifically binds to EGFR. In some embodiments, the third domain comprises a CDR1 comprising an amino acid selected from the group consisting of SEQ ID NOS: 651-699, a CDR2 comprising an amino acid selected from the group consisting of SEQ ID NOS: 700-748, a CDR3 comprising an amino acid selected from the group consisting of SEQ ID NOS: 479-797. In some embodiments, the third domain comprises an amino acid sequence selected from the group consisting of SEQ ID NOS: 798-846.

[0018] In some embodiments, the third domain is a single domain antibody that specifically binds to FLT3. In some embodiments, the third domain comprises a CDR1 comprising an amino acid selected from the group consisting of SEQ ID NOS: 1080-1155 and 3497-3498, a CDR2 comprising an amino acid selected from the group consisting of SEQ ID NOS: 1156-1231, and 3499-3500, a CDR3 comprising an amino acid selected from the group consisting of SEQ ID NOS: 1232-1307, and 3501-3502. In some embodiments, the CDR1 comprises an amino acid sequence selected from the group consisting of SEQ ID NOS: 1150, 1152, 3497, and 3498; the CDR2 comprises an amino acid sequence selected from the group consisting of SEQ ID NOS: 1226, 1228, 3499, and 3500; the CDR3 comprises an amino acid sequence selected from the group consisting of SEQ ID NOS: 1302, 1304, 3501, and 3502. In some embodiments, the third domain comprises an amino acid sequence selected from the group consisting of SEQ ID NOS: 1004-1079 and 3495-3496. In some embodiments, the third domain comprises an amino acid sequence selected from the group consisting of: SEQ ID NOS: 1074, 1076, 3495, and 3496. In some embodiments, the third domain is a single domain antibody that specifically binds to EpCAM. In some embodiments, the third domain comprises a CDR1 comprising an amino acid selected from the group consisting of SEQ ID NOS: 847-884, a CDR2 comprising an amino acid selected from the group consisting of SEQ ID NOS: 885-922, a CDR3 comprising an amino acid selected from the group consisting of SEQ ID NOS: 923-960. In some embodiments, the CDR1 comprises the amino acid sequence of SEQ ID NO: 874 or 863, the CDR2 comprises the amino acid of SEQ ID NO: 885 or 901, and the CDR3 comprises the amino acid sequence of SEQ ID NO: 923 or 939. In some embodiments, the third domain comprises a sequence selected from the group consisting of SEQ ID NOS: 961-1003. In some embodiments, the third domain comprises the amino acid sequence of SEQ ID NO: 999 or 1003. In some embodiments, the first domain comprises a single-chain variable fragment (scFv) specific to human CD3. In some embodiments, the scFv specific to human CD3 comprises a variable heavy chain region (VH), a variable light chain region (VL), and a linker, wherein VH comprises complementarity determining regions HC CDR1, HC CDR2, and HC CDR3, and wherein VL comprises complementarity determining regions LC CDR1, LC CDR2, and LC CDR3. In some embodiments, the HC CDR1 comprises an amino acid sequence selected from the group consisting of SEQ ID NOS: 3081, and 3087-3098, the HC CDR2 comprises an amino acid sequence selected from the group consisting of SEQ ID NOS: 3082, and 3099-3109, and the HC CDR3 comprises an amino acid sequence selected from the group consisting of SEQ ID NOS: 3083, and 3110-3119. In some embodiments, the HC CDR1 comprises the amino acid sequence of SEQ ID NO: 3097, the HC CDR2 comprises the amino acid sequence of SEQ ID NO: 3108, the HC CDR3 comprises the amino acid sequence of SEQ ID NO: 3110. In some embodiments, the LC CDR1 comprises an amino acid sequence selected from the group consisting of SEQ ID NOS: 3084, and 3120-3132, the LC CDR2 comprises an amino acid sequence selected from the group consisting of SEQ ID NOS: 3085, and 3099-3109, and the LC CDR3 comprises an amino acid sequence selected from the group consisting of SEQ ID NOS: 3086, and 3146-3152. In some embodiments, the LC CDR1 comprises the amino acid sequence of SEQ ID NO: 3120, the LC CDR2 comprises the amino acid sequence of SEQ ID NO: 3145, the LC CDR3 comprises the amino acid sequence of SEQ ID NO: 3146.

[0019] In some embodiments, the first domain comprises an amino acid sequence selected from the group consisting of SEQ ID NOS: 3153-3169. In some embodiments, the first domain comprises the amino acid sequence of SEQ ID NO: 3153. In some embodiments, the linker comprises an amino acid sequence GGGGSGGGGSGGGGS (SEQ ID NO: 3199).

[0020] In some embodiments, the second domain comprises a single domain antibody (sdAb) which specifically binds to HSA. In some embodiments, the sdAb which specifically binds to HSA comprises complementarity determining regions CDR1, CDR2, and CDR3, wherein the CDR1 comprises an amino acid sequence selected from the group consisting of SEQ ID NOS: 3170 and 3173-3175, the CDR2 comprises an amino acid sequence selected from the group consisting of SEQ ID NOS: 3171 and 3176-3181, and the CDR3 comprises an amino acid sequence selected from the group consisting of SEQ ID NOS: 3172 and 8182-3183. In some embodiments, the CDR1 comprises an amino acid sequence of SEQ ID NO: 3174, the CDR2 comprises an amino acid of SEQ ID NO: 3178, and the CDR3 comprises an amino acid sequence of SEQ ID NO: 3183. In some embodiments, the second domain comprises an amino acid sequence selected from the group consisting of SEQ ID NOS: 3184-3193. In some embodiments, the second domain comprises the amino acid sequence of SEQ ID NO: 3190. In some embodiments, the linkers L1 and L2 are each, independently, (GS)ₙ (SEQ ID NO: 3525), (GGS)ₙ(SEQ ID NO: 3526), (GGGS)ₙ(SEQ ID NO: 3527), (GGSG)ₙ (SEQ ID NO: 3528), (GGSGG)ₙ (SEQ ID NO: 3194), or (GGGGS)ₙ (SEQ ID NO: 3195), wherein n is 1, 2, 3, 4, 5, 6, 7, 8, 9, or 10. In some embodiments, linkers L1 and L2 are each, independently, (GGGGS)₄ (SEQ ID NO: 3198) or (GGGGS)₃ (SEQ ID NO: 3199).

[0021] In some embodiments, the immunomodulator and the half-life extended immune cell engaging protein are in a single pharmaceutical composition. In some embodiments, the immunomodulator and the half-life extended immune cell engaging protein are in separate pharmaceutical compositions.

[0022] Provided herein is a composition comprising an immunomodulator and a half-life extended immune cell engaging protein.

[0023] Provided herein is a method for the treatment or amelioration of a disease in a subject in need thereof, comprising administering to the subject a combination or a composition provided herein. In some embodiments, the disease is a cancer.

[0024] Provided herein is a method for increasing survival in a subject suffering from a cancer, the method comprising administering to the subject a combination or a composition provided herein. Provided herein is a method of reducing tumor size, the method comprising administering to a subject from a cancer a combination or a composition provided herein.

[0025] In some embodiments, the cancer is selected from the group consisting of: a mesothelioma, a prostate cancer, a breast cancer, a brain cancer, a bladder cancer, a pancreatic carcinoma, a renal cancer, a solid tumor, a liver cancer, a leiomyosarcoma, an endometrium cancer, a breast cancer, a female reproductive system cancer, an ovarian carcinoma, a soft tissue sarcoma, a gastric cancer, a digestive/gastrointestinal cancer, a colorectal cancer, a glioblastoma multiforme, a head and neck cancer, a squamous cell carcinoma, a colon cancer, a gastric cancer, a rhabdomyosarcoma, an adrenal cancer, a lung cancer, an esophageal cancer, a colon cancer, a lung cancer, a non-small cell lung carcinoma (NSCLC), a neuroblastoma, a melanoma, glioblastoma multiforme, an ovarian cancer, an endocrine cancer, a respiratory/thoracic cancer, an anal cancer, a gastro-esophageal cancer, a thyroid cancer, a cervical cancer, an endometrial cancer, a hematological cancer, a leukemia, a lymphocytic leukemia, a multiple myeloma, a lymphoma, a Hodgkin's lymphoma, a non-Hodgkin's lymphoma, a lymphocytic leukemia, an anaplastic large-cell lymphoma (ALCL), or a myeloid leukemia. In some embodiments, the cancer is the prostate cancer. In some embodiments, the cancer is the ovarian carcinoma. In some embodiments, the cancer is the pancreatic carcinoma. In some embodiments, the cancer is the mesothelioma. In some embodiments, the cancer is the lung cancer. In some embodiments, the administering the combination results in an increased therapeutic benefit compared to administering the immunomodulator alone without the half-life extended immune cell engaging protein. In some embodiments, the administering the combination results in an increased therapeutic benefit compared to administering the half-life extended immune cell engaging protein alone without the immunomodulator. In some embodiments, the half-life extended immune cell engaging protein and the immunomodulator are administered concurrently. In some embodiments, the half-life extended immune cell engaging protein and the immunomodulator are administered sequentially.

[0026] Provided herein is a method of increasing the sensitivity of a subject to a therapy comprising administering an immune checkpoint inhibitor, the method comprising administering to the subject a half-life extended immune cell engaging protein comprising: (i) a first domain (A) which specifically binds to human CD3, (ii) a second domain (B) which specifically binds to human serum albumin (HSA), and (iii) a third domain (C) which specifically binds to a target antigen. In some embodiments, the administering the half-life extended immune cell engaging protein increases the concentration of an immune checkpoint protein targeted by the immune checkpoint inhibitor, in the subject.

[0027] In some embodiments, the immune checkpoint protein is PD-1. In some embodiments, the immune checkpoint inhibitor comprises an antibody selected from the group consisting of: and is selected from the group consisting of: Pembrolizumab (humanized antibody), Pidilizumab (CT-011, monoclonal antibody, binds DLL1 and PD-1), Spartalizumab (PDR001, monoclonal antibody), Nivolumab (BMS-936558, MDX-1106, human IgG4 monoclonal antibody), MEDI0680 (AMP-514, monoclonal antibody), Cemiplimab (REGN2810, monoclonal antibody), Dostarlimab (TSR-042, monoclonal antibody), Sasanlimab (PF-06801591, monoclonal antibody), Tislelizumab (BGB-A317, monoclonal antibody), BGB-108 (antibody), Tislelizumab (BGB-A317, antibody), Camrelizumab (INCSHR1210, SHR-1210), AMP-224, Zimberelimab (AB122, GLS-010, WBP-3055, monoclonal antibody), AK-103 (HX-008, monoclonal antibody), AK-105 (anti-PD-1 antibody), CS1003 (monoclonal antibody), HLX10 (monoclonal antibody), Retifanlimab (MGA-012, anti-PD-1 monoclonal antibody), BI-754091 (antibody), Balstilimab (AGEN2034, PD-1 antibody), toripalimab (JS-001, antibody), cetrelimab (JNJ-63723283, anti-PD-1 antibody), genolimzumab (CBT-501, anti-PD-1 antibody), LZM009 (anti-PD-1 monoclonal antibody), Prolgolimab (BCD-100, anti-PD-1 monoclonal antibody), Sym021 (antibody), ABBV-181 (antibody), BAT-1306 (antibody), JTX-4014, sintilimab (IBI-308), Tebotelimab (MGD013, PD-1/LAG-3 bispecific), MGD-019 (PD-1/CTLA4 bispecific antibody), KN-046 (PD-1/CTLA4 bispecific antibody), MEDI-5752 (CTLA4/PD-1 bispecific antibody), RO7121661 (PD-1/TIM-3 bispecific antibody), XmAb207I7 (PD-1/CTLA4 bispecific antibody), and AK-104 (CTLA4/PD-1 bispecific antibody).

[0028] In some embodiments, the third domain specifically binds to a target antigen selected from the group consisting of: wherein the target antigen is selected from the group consisting of CD19 (B-lymphocyte antigen CD19, B-Lymphocyte Surface Antigen B4, T-Cell Surface Antigen Leu-12, CVID3), PSMA (prostate specific membrane antigen), MSLN (mesothelin), BCMA (B-cell maturation antigen), DLL3 (Delta-like ligand 3), EGFR (epidermal growth factor receptor), FLT3 (FMS-like tyrosine kinase 3), CD20 (B-lymphocyte antigen CD20, MS4A1, B1, Bp35, CVID5, LEU-16, MS4A2, S7, membrane spanning 4-domains A1), CD22 (SIGLEC-2, SIGLEC2), CD25 (IL2RA, interleulin-2 receptor alpha chain), CD27 (S152, S152. LPFS2, T14, TNFRSF7, Tp55), CD30 (TNFRSF8), CD33 (Siglec-3, sialic acid binding Ig-like lectin 3, SIGLEC3, SIGLEC-3, gp67, p67), CD37 (GP52-40, TSPAN26), CD38 (cyclic ADP ribose hydrolase, ADPRC1, ADPRC 1), CD40 (Bp50, CDW40, TNFRSF5, p50), CD44 (HCAM, homing cell adhesion molecule), Pgp-1 (phagocytic glycoprotein-1), Hermes antigen, lymphocyte homing receptor, ECM-III, and HUTCH-1), CD48 (BLAST-1, B-lymphocyte activation marker, SLAMF2, signaling lymphocytic activation molecule 2), CD52 (CAMPATH-1 antigen), CD70, CD73 (NT5E, ecto-5′-nucleotidase), CD39 (ENTPD1, Ectonucleoside triphosphate diphosphohydrolase-1), CD74 (HLA class II histocompatibility antigen gamma chain, HLA-DR antigens-associated invariant chain), CD79b (immunoglobulin-associated beta), CD80 (B7-1), CD86 (B7-2), CD123 (IL3RA, interleukin-3 receptor), CD133 (PROM1), CD137 (TNFRSF9, tumor necrosis factor receptor superfamily member 9, 4-1BB, ILA, induced by lymphocyte activation), CD138 (SDC1), alpha fetoprotein (AFP), c-Met; c-Kit; CD371 (CLEC12A, C-type lectin domain family 12 member A, CLL1)); CD370 (CLEC9A, C-type lectin domain containing 9A); cadherin 3 (CDH3, p-cadherin, PCAD); carbonic anhydrase 6 (CA6); carbonic anhydrase 9 (CA9, CAIX); carcinoembryonic antigen related cell adhesion molecule 3 (CEACAM3); carcinoembryonic antigen related cell adhesion molecule 5 (CEACAM5); CD66c (CEACAM6, carcinoembryonic antigen related cell adhesion molecule 6); chorionic somatomammotropin hormone 1 (CSH1, CS1); coagulation factor III, tissue factor (F3, TF); collectin subfamily member 10 (COLEC10); delta like canonical Notch ligand 3 (DLL3); ectonucleotide pyrophosphatase/phosphodiesterase 3 (ENPP3); ephrin A1 (EFNA1); epidermal growth factor receptor (EGFR); EGFR variant III (EGFRvIII); EPH receptor A2 (EPHA2); epithelial cell adhesion molecule (EPCAM); erb-b2 receptor tyrosine kinase 2 (ERBB2, HER2); fibroblast activation protein alpha (FAP); fibroblast growth factor receptor 2 (FGFR2); fibroblast growth factor receptor 3 (FGFR3); folate hydrolase 1 (FOLH1, PSMA); folate receptor 1 (FOLR1, FRa); GD2 ganglioside; glycoprotein NMB (GPNMB, osteoactivin); guanylate cyclase 2C (GUCY2C, GCC); human papillomavirus (HPV) E6; HPV E7; major histocompatibility complex (MHC) class I-presented neoantigens, major histocompatibility complex (MHC) class II-presented neoantigens, major histocompatibility complex, class I, E (HLA-E); major histocompatibility complex, class I, F (HLA-F); major histocompatibility complex, class I, G (HLA-G, MHC-G); integrin subunit beta 7 (ITGB7); leukocyte immunoglobulin like receptor B1 (LILRB1, ILT2); leukocyte immunoglobulin like receptor B2 (LILRB2, ILT4); LY6/PLAUR domain containing 3 (LYPD3, C4.4A); glypican 3 (GPC3); KRAS proto-oncogene, GTPase (KRAS); MAGE family member A1 (MAGEA1); MAGE family member A3 (MAGEA3); MAGE family member A4 (MAGEA4); MAGE family member A11 (MAGEA11); MAGE family member C1 (MAGEC1); MAGE family member C2 (MAGEC2); MAGE family member D1 (MAGED1); MAGE family member D2 (MAGED2); mesothelin (MSLN); mucin 1 (MUC1) and splice variants thereof (e.g., MUC1/C, D, and Z); mucin 16 (MUC16); necdin (NDN); nectin cell adhesion molecule 4 (NECTIN4); SLIT and NTRK like family member 6 (SLITRK6); promyelocytic leukemia (PML, TRIM19); protein tyrosine kinase 7 (inactive) (PTK7); CD352 (SLAMF6, SLAM family member 6); CD319 (SLAMF7, SLAM family member 7, 19A, CRACC, CS1); sialic acid binding Ig like lectin 7 (SIGLEC7); sialic acid binding Ig like lectin 9 (SIGLEC9); solute carrier family 34 (sodium phosphate), member 2 (SLC34A2); solute carrier family 39 member 6 (SLC39A6, LIV1); STEAP family member 1 (STEAP1); STEAP family member 2 (STEAP2); CD134 (TNFRSF4, TNF receptor superfamily member 4, OX40); CD137L (TNFSF9, TNF superfamily member 9, 4-1BB-L); CD261 (TNFRSF10A, TNF receptor superfamily member 10a, DR4, TRAILR1); CD262 (TNFRSF10B, TNF receptor superfamily member 10b, DR5, TRAILR2); CD267 (TNFRSF13B, TNF receptor superfamily member 13B, TACI, IGAD2); CD269 (TNFRSF17, TNF receptor superfamily member 17, BCMA,); CD357 (TNFRSF18, TNF receptor superfamily member 18 GITR); transferrin (TF); transforming growth factor beta 1 (TGFB1); trophoblast glycoprotein (TPBG, 5T4); trophinin (TRO, MAGED3); tumor associated calcium signal transducer 2 (TACSTD2, TROP2, EGP1); Fucosyl GMT; Sialyl Lewis adhesion molecule (sLe); ROR1; CD30; and Lewis Y antigen.

[0029] Provided herein is a method of improving the efficacy of a therapy comprising administering an immunomodulator to a subject, wherein the method further comprises administering to the subject a half-life extended immune cell engaging protein. In some embodiments, the immunomodulator comprises an immunostimulatory antibody agonist of a co-stimulatory receptor. In some embodiments, the immunomodulator comprises an immune checkpoint modulator. In some embodiments, the immune checkpoint modulator is an antagonist of at least one of: programmed cell death 1 (PDCD1, PD1, PD-1), CD274 (CD274, PDL1, PD-L1), PD-L2, cytotoxic T-lymphocyte associated protein 4 (CTLA4, CD152), CD276 (B7H3); V-set domain containing T cell activation inhibitor 1 (VTCN1, B7H4), CD272 (B and T lymphocyte associated (BTLA)), killer cell immunoglobulin like receptor, three Ig domains and long cytoplasmic tail 1 (KIR, CD158E1), lymphocyte activating 3 (LAG3, CD223), hepatitis A virus cellular receptor 2 (HAVCR2, TIMD3, TIM3), V-set immunoregulatory receptor (VSIR, B7H5, VISTA), T cell immunoreceptor with Ig and ITIM domains (TIGIT), programmed cell death 1 ligand 2 (PDCD1LG2, PD-L2, CD273), immunoglobulin superfamily member 11 (IGSF11, VSIG3), TNFRSF14 (HVEM, CD270), TNFSF14 (HVEML), PVR related immunoglobulin domain containing (PVRIG, CD112R), galectin 9 (LGALS9), killer cell immunoglobulin like receptor, two Ig domains and long cytoplasmic tail 1 (KIR2DL1); killer cell immunoglobulin like receptor, two Ig domains and long cytoplasmic tail 2 (KIR2DL2); killer cell immunoglobulin like receptor, two Ig domains and long cytoplasmic tail 3 (KIR2DL3); and killer cell immunoglobulin like receptor, three Ig domains and long cytoplasmic tail 1 (KIR3DL1), killer cell lectin like receptor C1 (KLRC1, NKG2A, CD159A), killer cell lectin like receptor D1 (KLRD1, CD94), killer cell lectin like receptor G1 (KLRG1, CLEC15A, MAFA, 2F1), sialic acid binding Ig like lectin 7 (SIGLEC7), SIGLEC, sialic acid binding Ig like lectin 9 (SIGLEC9), CEACAM (e.g., CEACAM-1, CEACAM-3 and/or CEACAM-5), VISTA, LAIR1, CD160, 2B4, CD80, CD86, B7-H1, B7-H3 (CD276), B7-H4 (VTCN1), HVEM (TNFRSF14 or CD270), KIR, A2AR, A2BR, MHC class I, MHC class II, GAL9, adenosine, TGFR (e.g., TGFR beta), CD94/NKG2A, IDO, TDO, CD39, CD73, GARP, CD47, PVRIG, CSF1R, and NOX, or any combination thereof.

[0030] In some embodiments, the immune checkpoint modulator is an antagonist of PD-1 and is selected from the group consisting of. Pembrolizumab (humanized antibody), Pidilizumab (CT-011, monoclonal antibody, binds DLL1 and PD-1), Spartalizumab (PDR001, monoclonal antibody), Nivolumab (BMS-936558, MDX-1106, human IgG4 monoclonal antibody), MEDI0680 (AMP-514, monoclonal antibody), Cemiplimab (REGN2810, monoclonal antibody), Dostarlimab (TSR-042, monoclonal antibody), Sasanlimab (PF-06801591, monoclonal antibody), Tislelizumab (BGB-A317, monoclonal antibody), BGB-108 (antibody), Tislelizumab (BGB-A317, antibody), Camrelizumab (INCSHR1210, SHR-1210), AMP-224, Zimberelimab (AB122, GLS-010, WBP-3055, monoclonal antibody), AK-103 (HX-008, monoclonal antibody), AK-105 (anti-PD-1 antibody), CS1003 (monoclonal antibody), HLX10 (monoclonal antibody), Retifanlimab (MGA-012, anti-PD-1 monoclonal antibody), BI-754091 (antibody), Balstilimab (AGEN2034, PD-1 antibody), toripalimab (JS-001, antibody), cetrelimab (JNJ-63723283, anti-PD-1 antibody), genolimzumab (CBT-501, anti-PD-1 antibody), LZM009 (anti-PD-1 monoclonal antibody), Prolgolimab (BCD-100, anti-PD-1 monoclonal antibody), Sym021 (antibody), ABBV-181 (antibody), BAT-1306 (antibody), JTX-4014, sintilimab (IBI-308), Tebotelimab (MGD013, PD-1/LAG-3 bispecific), MGD-019 (PD-1/CTLA4 bispecific antibody), KN-046 (PD-1/CTLA4 bispecific antibody), MEDI-5752 (CTLA4/PD-1 bispecific antibody), RO7121661 (PD-1/TIM-3 bispecific antibody), XmAb207I7 (PD-1/CTLA4 bispecific antibody), and AK-104 (CTLA4/PD-1 bispecific antibody). In some embodiments, the immune checkpoint modulator is Pembrolizumab.

[0031] In some embodiments, the immune checkpoint modulator is an antibody that binds to PD-L1 and is selected from the group consisting of Atezolizumab (MPDL3280A, monoclonal antibody), Avelumab (MSB0010718C, monoclonal antibody), Durvalumab (MEDI-4736, human immunoglobulin G1 kappa (IgG1κ) monoclonal antibody), Envafolimab (KN035, single-domain PD-L1 antibody), AUNP12, CA-170 (small molecule targeting PD-L1 and VISTA), BMS-986189 (macrocyclic peptide), BMS-936559 (Anti-PD-L1 antibody), Cosibelimab (CK-301, monoclonal antibody), LY3300054 (antibody), CX-072 (antibody), CBT-502 (antibody), MSB-2311 (antibody), BGB-A333 (antibody), SHR-1316 (antibody), CS1001 (WBP3155, antibody), HLX-20 (antibody), KL-A167 (HBM 9167, antibody), STI-A1014 (antibody), STI-A1015 (IMC-001, antibody), BCD-135 (monoclonal antibody), FAZ-053 (antibody), CBT-502 (TQB2450, antibody), MDX1105-01 (antibody), FS-118 (LAG-3/PD-L1, bispecific antibody), M7824 (anti-PD-L1/TGF-0 receptor II fusion protein), CDX-527 (CD27/PD-L1 bispecific antibody), LY3415244 (TIM3/PD-L1 bispecific antibody), INBRX-105 (4-1BB/PD-L1 bispecific antibody). In some embodiments, the immune checkpoint modulator is Atezolizumab.

[0032] In some embodiments, the immune checkpoint modulator is an anti-CD39 antibody. In some embodiments, the anti-CD39 antibody is IPH5201. In some embodiments, the immune checkpoint modulator is an anti-CD73 antibody. In some embodiments, the anti-CD73 antibody is IPH5301. In some embodiments, the immunomodulator is an inhibitor of at least one of: A2AR, CD39, or CD73. In some embodiments, the inhibitor is a small molecule inhibitor.

[0033] In some embodiments, the immune checkpoint modulator comprises an immune checkpoint activator. In some embodiments, the immune checkpoint activator is an agonist of CD27, CD70, CD40, CD40LG, TNF receptor superfamily member 4 (TNFRSF4, OX40); TNF superfamily member 4 (TNFSF4, OX40L), GITR (TNF receptor superfamily member 18, TNFRSF18, CD357), TNFSF18 (GITRL), CD137 (TNFRSF9, tumor necrosis factor receptor superfamily member 9, 4-1BB, ILA, induced by lymphocyte activation), CD137L (TNFSF9), CD28, CD278 (inducible T cell co-stimulator, ICOS), inducible T cell co-stimulator ligand (ICOSLG, B7H2), CD80 (B7-1), nectin cell adhesion molecule 2 (NECTIN2, CD112), CD226 (DNAM-1), Poliovirus receptor (PVR) cell adhesion molecule (PVR, CD155), CD16, killer cell lectin like receptor K1 (KLRKI1, NKG2D, CD314), or SLAM family member 7 (SLAMF7). In some embodiments, the agonist is an antibody. In some embodiments, the subject is a human.

[0034] Provided herein is a kit comprising: (a) an immunomodulator and (b) a half-life extended immune cell engaging protein and instructions for administering (a) and (b), sequentially or concurrently, to a subject. Provided herein is a kit comprising: a combination or a composition provided herein, and instructions for administering the immunomodulator and the half-life extended immune cell engaging protein, sequentially or concurrently, to a subject.

[0035] In some embodiments, the subject has a cancer. In some embodiments, the cancer is selected from the group consisting of: mesothelioma, a prostate cancer, a breast cancer, a brain cancer, a bladder cancer, a pancreatic carcinoma, a renal cancer, a solid tumor, a liver cancer, a leiomyosarcoma, an endometrium cancer, a breast cancer, a female reproductive system cancer, a soft tissue sarcoma, a gastric cancer, a digestive/gastrointestinal cancer, a colorectal cancer, a glioblastoma multiforme, a head and neck cancer, a squamous cell carcinoma, a colon cancer, a gastric cancer, a rhabdomyosarcoma, an adrenal cancer, a lung cancer, an esophageal cancer, a colon cancer, a lung cancer, a non-small cell lung carcinoma (NSCLC), a neuroblastoma, a melanoma, glioblastoma multiforme, an ovarian cancer, an endocrine cancer, a respiratory/thoracic cancer, an anal cancer, a gastro-esophageal cancer, a thyroid cancer, a cervical cancer, an endometrial cancer, a hematological cancer, a leukemia, a lymphocytic leukemia, a multiple myeloma, a lymphoma, a Hodgkin's lymphoma, a non-Hodgkin's lymphoma, a lymphocytic leukemia, an anaplastic large-cell lymphoma (ALCL), or a myeloid leukemia. In some embodiments, the cancer is the prostate cancer. In some embodiments, the cancer is the ovarian carcinoma. In some embodiments, the cancer is the pancreatic carcinoma. In some embodiments, the cancer is the mesothelioma. In some embodiments, the cancer is the lung cancer. In some embodiments, the subject is a human.

### BRIEF DESCRIPTION OF THE DRAWINGS

[0036] The novel features of the invention are set forth with particularity in the appended claims. A better understanding of the features and advantages of the present invention will be obtained by reference to the following detailed description that sets forth illustrative embodiments, in which the principles of the invention are utilized, and the accompanying drawings of which:

[0037] FIGS. 1A-1B illustrate molecular mechanisms for the combination therapy using immunomodulators and immune cell engaging proteins. FIG. 1A illustrates administering exemplary immune cell engaging proteins (TriTAC protein) without immunomodulators, FIG. 1B illustrates administering exemplary immune cell engaging proteins (TriTAC protein) with exemplary immunomodulators (PD-1 and PD-L1 inhibitors).

[0038] FIGS. 2A-2B illustrate FACS analysis of PD-1 and PD-L1 expression on T cells cocultured with 22Rv1 prostate cancer cells following treatment with a half-life extended prostate specific membrane antigen (PSMA) binding immune cell engaging protein. FIG. 2A illustrates PD-1 levels with donor 1764 (left) and donor 63 (right) and FIG. 2B illustrates PD-L1 levels with donor 1764 (left) and donor 63 (right).

[0039] FIG. 3 illustrates FACS analysis of PD-L1 expression on 22Rv1 prostate cancer cells following treatment with a half-life extended prostate specific membrane antigen (PSMA) binding immune cell engaging protein or IFNγ.

[0040] FIG. 4 illustrates FACS analysis of PD-L1 expression on PC3-PSMA prostate cancer cells following treatment with a half-life extended prostate specific membrane antigen (PSMA) binding immune cell engaging protein or IFNγ.

[0041] FIG. 5 illustrates 22Rv1 prostate cancer tumor model treated with a half-life extended prostate specific membrane antigen (PSMA) binding immune cell engaging protein alone or in combination with pembrolizumab or atezolizumab.

[0042] FIG. 6 illustrates PC3-PSMA prostate cancer tumor model treated with a half-life extended prostate specific membrane antigen (PSMA) binding immune cell engaging protein alone or in combination with pembrolizumab or atezolizumab.

[0043] FIGS. 7A-7B illustrate FACS analysis of PD-1 and PD-L1 expression on T cells cocultured with NCI-H292 lung cancer cells following treatment with a mesothelin (MSLN) binding immune cell engaging protein. FIG. 7A illustrates PD-1 levels with donor 1764 (left) and donor 63 (right) and FIG. 7B illustrates PD-L1 levels with donor 1764 (left) and donor 63 (right).

[0044] FIG. 8 illustrates FACS analysis of PD-L1 expression on NCI-H292 lung cancer cells following treatment with a half-life extended mesothelin (MSLN) binding immune cell engaging protein or IFNγ.

[0045] FIG. 9 illustrates FACS analysis of PD-L1 expression on OVCAR8 cancer cells following treatment with IFNγ.

[0046] FIGS. 10A-10B illustrates HCI-H292 lung cancer tumor model treated with a half-life extended mesothelin (MSLN) binding immune cell engaging protein alone or in combination with atezolizumab or pembrolizumab. The two plots represent the results of two independent experiments. FIG. 10A illustrates the results of NCI-H292-005 and FIG. 10B illustrates the results of NCI-H292-006.

[0047] FIG. 11 illustrates OVCAR8 ovarian cancer tumor model treated with a half-life extended mesothelin (MSLN) binding immune cell engaging protein alone or in combination with atezolizumab.

[0048] FIGS. 12A-12B illustrate FACS analysis of PD-1 and PD-L1 expression on T cells cocultured with SHP-77 small cell lung cancer cells following treatment with a half-life extended DLL3 binding immune cell engaging protein. FIG. 12A illustrates PD-1 levels with donor 1764 (left) and donor 63 (right) and FIG. 12B illustrates PD-L1 levels with donor 1764 (left) and donor 63 (right).

[0049] FIG. 13 illustrates FACS analysis of PD-L1 expression on SHP-77 small cell lung cancer cells following treatment with IFNγ.

[0050] FIG. 14 illustrates SHP-77 small cell lung cancer tumor model treated with a half-life extended DLL3 binding immune cell engaging protein alone or in combination with pembrolizumab or atezolizumab.

### DETAILED DESCRIPTION OF THE INVENTION

### Certain Definitions

[0051] The terminology used herein is for the purpose of describing particular cases only and is not intended to be limiting. As used herein, the singular forms “a”, “an” and “the” are intended to include the plural forms as well, unless the context clearly indicates otherwise. Furthermore, to the extent that the terms “including”, “includes”, “having”, “has”, “with”, or variants thereof are used in either the detailed description and/or the claims, such terms are intended to be inclusive in a manner similar to the term “comprising.”

[0052] The term “about” or “approximately” means within an acceptable error range for the particular value as determined by one of ordinary skill in the art, which will depend in part on how the value is measured or determined, e.g., the limitations of the measurement system. For example, “about” can mean within 1 or more than 1 standard deviation, per the practice in the given value. Where particular values are described in the application and claims, unless otherwise stated the term “about” should be assumed to mean an acceptable error range for the particular value.

[0053] The terms “individual,” “patient,” or “subject” are used interchangeably. None of the terms require or are limited to situation characterized by the supervision (e.g. constant or intermittent) of a health care worker (e.g. a doctor, a registered nurse, a nurse practitioner, a physician's assistant, an orderly, or a hospice worker).

[0054] An “antibody” typically refers to a Y-shaped tetrameric protein comprising two heavy (H) and two light (L) polypeptide chains held together by covalent disulfide bonds and non-covalent interactions. Human light chains comprise a variable domain (VL) and a constant domain (CL) wherein the constant domain may be readily classified as kappa or lambda based on amino acid sequence and gene loci. Each heavy chain comprises one variable domain (VH) and a constant region, which in the case of IgG, IgA, and IgD, comprises three domains termed CH1, CH2, and CH3 (IgM and IgE have a fourth domain, CH4). In IgG, IgA, and IgD classes the CH1 and CH2 domains are separated by a flexible hinge region, which is a proline and cysteine rich segment of variable length (generally from about 10 to about 60 amino acids in IgG). The variable domains in both the light and heavy chains are joined to the constant domains by a “J” region of about 12 or more amino acids and the heavy chain also has a “D” region of about 10 additional amino acids. Each class of antibody further comprises inter-chain and intra-chain disulfide bonds formed by paired cysteine residues. There are two types of native disulfide bridges or bonds in immunoglobulin molecules: interchain and intrachain disulfide bonds. The location and number of interchain disulfide bonds vary according to the immunoglobulin class and species. Interchain disulfide bonds are located on the surface of the immunoglobulin, are accessible to solvent and are usually relatively easily reduced. In the human IgG1 isotype there are four interchain disulfide bonds, one from each heavy chain to the light chain and two between the heavy chains. The interchain disulfide bonds are not required for chain association. As is well known the cysteine rich IgG1 hinge region of the heavy chain has generally been held to consist of three parts: an upper hinge, a core hinge, and a lower hinge. Those skilled in the art will appreciate that that the IgG1 hinge region contain the cysteines in the heavy chain that comprise the interchain disulfide bonds (two heavy/heavy, two heavy/light), which provide structural flexibility that facilitates Fab movements. The interchain disulfide bond between the light and heavy chain of IgG1 are formed between C214 of the kappa or lambda light chain and C220 in the upper hinge region of the heavy chain. The interchain disulfide bonds between the heavy chains are at positions C226 and C229 (all numbered per the EU index according to Kabat, et al., infra.)

[0055] As used herein the term “antibody” includes polyclonal antibodies, multiclonal antibodies, monoclonal antibodies, chimeric antibodies, deimmunized, humanized and primatized antibodies, CDR grafted antibodies, human antibodies, recombinantly produced antibodies, intrabodies, multispecific antibodies, bispecific antibodies, monovalent antibodies (e.g., a monovalent IgG), multivalent antibodies, anti-idiotypic antibodies, synthetic antibodies, including muteins and variants thereof, immunospecific antibody fragments such as: hcIgG, a V-NAR, Fv, Fd, Fab, F(ab′)2, F(ab′), Fab2, Fab3 fragments, single-chain fragments (e.g., di-scFv, scFv, scFvFc, scFv-zipper, scFab), disulfide-linked Fvs (sdFv), a Fd fragment consisting of the VH and CH1 domains, linear antibodies, single domain antibodies such as nanobodies or single variable domain antibodies comprising merely one variable domain such as sdAb (VH, VL, or VHH domains), “r IgG” (“half antibody”), diabodies, single chain diabodies, tandem diabodies (Tandab's), tandem di-scFv, tandem tri-scFv, “minibodies” are in some instances exemplified by a structure which is as follows: (VH-VL-CH3)2, (scFv-CH3)2, ((scFv)2-CH3+CH3), ((scFv)2-CH3) or (scFv-CH3-scFv)2, multibodies such as triabodies or tetrabodies; and derivatives thereof including Fc fusions and other modifications, and any other immunoreactive molecule so long as it comprises a domain having a binding site for preferential association or binding with an FLT3protein. Moreover, unless dictated otherwise by contextual constraints the term further comprises all classes of antibodies (i.e. IgA, IgD, IgE, IgG, and IgM) and all subclasses (i.e., IgG1, IgG2, IgG3, IgG4, IgA1, and IgA2). Heavy-chain constant domains that correspond to the different classes of antibodies are typically denoted by the corresponding lower case Greek letter alpha, delta, epsilon, gamma, and mu, respectively. Light chains of the antibodies from any vertebrate species can be assigned to one of two clearly distinct types, called kappa (kappa) and lambda (lambda), based on the amino acid sequences of their constant domains.

[0056] As used herein, “Variable region” or “variable domain” refers to the fact that certain portions of the variable domains differ extensively in sequence among antibodies and are used in the binding and specificity of each particular antibody for its particular antigen. However, the variability is not evenly distributed throughout the variable domains of antibodies. It is concentrated in three segments called complementarity-determining regions (CDRs) or hypervariable regions both in the light-chain and the heavy-chain variable domains. The more highly conserved portions of variable domains are called the framework (FR). The variable domains of native heavy and light chains each comprise four FR regions, largely adopting a (3-sheet configuration, connected by three CDRs, which form loops connecting, and in some cases forming part of, the Psheet structure. The CDRs in each chain are held together in close proximity by the FR regions and, with the CDRs from the other chain, contribute to the formation of the antigen-binding site of antibodies (see, Kabat et al., Sequences of Proteins of Immunological Interest, Fifth Edition, National Institute of Health, Bethesda, Md. (1991)). The constant domains are not involved directly in binding an antibody to an antigen, but exhibit various effector functions, such as participation of the antibody in antibody-dependent cellular toxicity. The assignment of amino acids to each domain, framework region and CDR is, in some embodiments, in accordance with one of the numbering schemes provided by Kabat et al. (1991) Sequences of Proteins of Immunological Interest (5th Ed.), US Dept. of Health and Human Services, PHS, NIH, NIH Publication no. 91-3242; Chothia et al., 1987, PMID: 3681981; Chothia et al., 1989, PMID: 2687698; MacCallum et al., 1996, PMID: 8876650; or Dubel, Ed. (2007) Handbook of Therapeutic Antibodies, 3rd Ed., Wily-VCH Verlag GmbH and Co or AbM (Oxford Molecular/MSI Pharmacopeia) unless otherwise noted.

[0057] “Variable domain residue numbering as in Kabat” or “amino acid position numbering as in Kabat,” and variations thereof, refers to the numbering system used for heavy chain variable domains or light chain variable domains of the compilation of antibodies in Kabat et al., Id. Using this numbering system, the actual linear amino acid sequence may contain fewer or additional amino acids corresponding to a shortening of, or insertion into, a FR or CDR of the variable domain. For example, a heavy chain variable domain may include a single amino acid insert (residue 52a according to Kabat) after residue 52 of H2 and inserted residues (e.g., residues 82a, 82b, and 82c, etc. according to Kabat) after heavy chain FR residue 82. The Kabat numbering of residues may be determined for a given antibody by alignment at regions of homology of the sequence of the antibody with a “standard” Kabat numbered sequence. It is not intended that CDRs of the present disclosure necessarily correspond to the Kabat numbering convention.

[0058] The term “Framework” or “FR” residues (or regions) refer to variable domain residues other than the CDR or hypervariable region residues as herein defined. A “human consensus framework” is a framework which represents the most commonly occurring amino acid residue in a selection of human immunoglobulin VL or VH framework sequences.

[0059] The term “epitope,” as used herein, refers to an antigenic determinant that interacts with a specific antigen binding site in the variable region of an antibody molecule known as a paratope. A single antigen may have more than one epitope. Thus, different antibodies may bind to different areas on an antigen and may have different biological effects. Epitopes may be either conformational or linear. A conformational epitope is produced by spatially juxtaposed amino acids from different segments of the linear polypeptide chain. A linear epitope is one produced by adjacent amino acid residues in a polypeptide chain. In certain circumstance, an epitope may include moieties of saccharides, phosphoryl groups, or sulfonyl groups on the antigen.

[0060] As used herein, the term “Percent (%) amino acid sequence identity” with respect to a sequence is defined as the percentage of amino acid residues in a candidate sequence that are identical with the amino acid residues in the specific sequence, after aligning the sequences and introducing gaps, if necessary, to achieve the maximum percent sequence identity, and not considering any conservative substitutions as part of the sequence identity. Alignment for purposes of determining percent amino acid sequence identity can be achieved in various ways that are within the skill in the art, for instance, using publicly available computer software programs such as EMBOSS MATCHER, EMBOSS WATER, EMBOSS STRETCHER, EMBOSS NEEDLE, EMBOSS LALIGN, BLAST, BLAST-2, ALIGN or MegAlign (DNASTAR) software. Those skilled in the art can determine appropriate parameters for measuring alignment, including any algorithms needed to achieve maximal alignment over the full length of the sequences being compared. Alignment for purposes of determining percent amino acid sequence identity can for example be achieved using publicly available sequence comparison computer program ALIGN-2. The source code for the ALIGN-2 sequence comparison computer program is available with user documentation in the U.S. Copyright Office, Washington D.C., 20559, where it is registered under U.S. Copyright Registration No. TXU510087. The ALIGN-2 program can be compiled for use on a UNIX operating system, such as a digital UNIX V4.0D. All sequence comparison parameters are set by the ALIGN-2 program and do not vary.

[0061] As used herein, “elimination half-time” is used in its ordinary sense, as is described in Goodman and Gillman's The Pharmaceutical Basis of Therapeutics 21-25 (Alfred Goodman Gilman, Louis S. Goodman, and Alfred Gilman, eds., 6th ed. 1980). Briefly, the term is meant to encompass a quantitative measure of the time course of drug elimination. The elimination of most drugs is exponential (i.e., follows first-order kinetics), since drug concentrations usually do not approach those required for saturation of the elimination process. The rate of an exponential process may be expressed by its rate constant, k, which expresses the fractional change per unit of time, or by its half-time, t_{1/2} the time required for 50% completion of the process. The units of these two constants are time-1 and time, respectively. A first-order rate constant and the half-time of the reaction are simply related (k×t_{1/2}=0.693) and may be interchanged accordingly. Since first-order elimination kinetics dictates that a constant fraction of drug is lost per unit time, a plot of the log of drug concentration versus time is linear at all times following the initial distribution phase (i.e., after drug absorption and distribution are complete). The half-time for drug elimination can be accurately determined from such a graph.

[0062] As used herein, the term “binding affinity” refers to the affinity of the proteins described in the disclosure to their binding targets, and is expressed numerically using “Kd” values. If two or more proteins are indicated to have comparable binding affinities towards their binding targets, then the Kd values for binding of the respective proteins towards their binding targets, are within ±2-fold of each other. If two or more proteins are indicated to have comparable binding affinities towards single binding target, then the Kd values for binding of the respective proteins towards said single binding target, are within ±2-fold of each other. If a protein is indicated to bind two or more targets with comparable binding affinities, then the Kd values for binding of said protein to the two or more targets are within ±2-fold of each other. In general, a higher Kd value corresponds to a weaker binding. In some embodiments, the “Kd” is measured by a radiolabeled antigen binding assay (RIA) or surface plasmon resonance assays using a BIACORE™-2000 or a BIACORE™-3000 (BIAcore, Inc., Piscataway, N.J.). In certain embodiments, an “on-rate” or “rate of association” or “association rate” or “kon” and an “off-rate” or “rate of dissociation” or “dissociation rate” or “koff” are also determined with the surface plasmon resonance technique using a BIAcore™-2000 or a BIAcore™-3000 (BIAcore, Inc., Piscataway, N.J.). In additional embodiments, the “Kd”, “kon”, and “koff” are measured using the OCTET® Systems (Pall Life Sciences). In an exemplary method for measuring binding affinity using the OCTET® Systems, the ligand, e.g., biotinylated human or cynomolgus FLT3 in case of an immune cell engaging protein comprising a FLT3 binding single domain antibody, is immobilized on the OCTET® streptavidin capillary sensor tip surface which streptavidin tips are then activated according to manufacturer's instructions using about 20-50 μg/ml human or cynomolgus FLT3 protein. A solution of PBS/Casein is also introduced as a blocking agent. For association kinetic measurements, FLT3 binding protein variants are introduced at a concentration ranging from about 10 ng/mL to about 100 μg/mL, about 50 ng/mL to about 5 μg/mL, or about 2 ng/mL to about 20 μg/mL. In some embodiments, the FLT3 binding single domain proteins are used at a concentration ranging from about 2 ng/mL to about 20 μg/mL. Complete dissociation is observed in case of the negative control, assay buffer without the binding proteins. The kinetic parameters of the binding reactions are then determined using an appropriate tool, e.g., ForteBio software.

[0063] As used herein, in some embodiments, “treatment” or “treating” or “treated” refers to therapeutic treatment wherein the object is to slow (lessen) an undesired physiological condition, disorder or disease, or to obtain beneficial or desired clinical results. For the purposes described herein, beneficial or desired clinical results include, but are not limited to, alleviation of symptoms; diminishment of the extent of the condition, disorder or disease; stabilization (i.e., not worsening) of the state of the condition, disorder or disease; delay in onset or slowing of the progression of the condition, disorder or disease; amelioration of the condition, disorder or disease state; and remission (whether partial or total), whether detectable or undetectable, or enhancement or improvement of the condition, disorder or disease. Treatment includes eliciting a clinically significant response without excessive levels of side effects. Treatment also includes prolonging survival as compared to expected survival if not receiving treatment. In other embodiments, “treatment” or “treating” or “treated” refers to prophylactic measures, wherein the object is to delay onset of or reduce severity of an undesired physiological condition, disorder or disease, such as, for example is a person who is predisposed to a disease (e.g., an individual who carries a genetic marker for a disease such as breast cancer).

[0064] Generally, it should be noted that the term single domain antibody as used herein in its broadest sense is not limited to a specific biological source or to a specific method of preparation. Single domain antibodies are antibodies whose complementary determining regions are part of a single domain polypeptide. Examples include, but are not limited to, heavy chain antibodies, antibodies naturally devoid of light chains, single domain antibodies derived from conventional 4-chain antibodies, engineered antibodies and single domain scaffolds other than those derived from antibodies. Single domain antibodies may be any of the art, or any future single domain antibodies. Single domain antibodies may be derived from any species including, but not limited to mouse, human, camel, llama, goat, rabbit, bovine. For example, in some embodiments, the single domain antibodies of the disclosure are obtained: (1) by isolating the VHH domain of a naturally occurring heavy chain antibody; (2) by expression of a nucleotide sequence encoding a naturally occurring VHH domain; (3) by “humanization” of a naturally occurring VHH domain or by expression of a nucleic acid encoding a such humanized VHH domain; (4) by “camelization” of a naturally occurring VH domain from any animal species, and in particular from a species of mammal, such as from a human being, or by expression of a nucleic acid encoding such a camelized VH domain; (5) by “camelization” of a “domain antibody” or “Dab,” or by expression of a nucleic acid encoding such a camelized VH domain; (6) by using synthetic or semi-synthetic techniques for preparing proteins, polypeptides or other amino acid sequences; (7) by preparing a nucleic acid encoding a single domain antibody using techniques for nucleic acid synthesis known in the field, followed by expression of the nucleic acid thus obtained; and/or (8) by any combination of one or more of the foregoing.

[0065] In some embodiments, an immune cell engaging protein as described herein comprises an antibody, e.g., a single domain antibody targeting an antigen, e.g., PSMA, MSLN, BCMA, DLL3, EGFR, EpCAM, FLT3, comprising an amino acid sequence that corresponds to the amino acid sequence of a naturally occurring VHH domain, but that has been “humanized”, e.g., by replacing one or more amino acid residues in the amino acid sequence of said naturally occurring VHH sequence (and in particular in the framework sequences) by one or more of the amino acid residues that occur at the corresponding position(s) in a VH domain from a conventional 4-chain antibody from a human being (e.g., as indicated above). This can be performed in a manner known in the field, which will be clear to the skilled person, for example on the basis of the further description herein. Again, it should be noted that such humanized single domain antibodies of the disclosure are obtained in any suitable manner known per se (e.g., as indicated under points (1)-(8) above) and thus are not strictly limited to polypeptides that have been obtained using a polypeptide that comprises a naturally occurring VHH domain as a starting material. In some additional embodiments, a single domain antibody, as described herein, comprises a single domain antibody with an amino acid sequence that corresponds to the amino acid sequence of a naturally occurring VH domain, but that has been “camelized”, i.e., by replacing one or more amino acid residues in the amino acid sequence of a naturally occurring VH domain from a conventional 4-chain antibody by one or more of the amino acid residues that occur at the corresponding position(s) in a VHH domain of a heavy chain antibody. Such “camelizing” substitutions are preferably inserted at amino acid positions that form and/or are present at the VH-VL interface, and/or at the so-called Camelidae hallmark residues (see for example WO 94/04678 and Davies and Riechmann (1994 and 1996)). Preferably, the VH sequence that is used as a starting material or starting point for generating or designing the camelized single domain is preferably a VH sequence from a mammal, more preferably the VH sequence of a human being, such as a VH3 sequence. However, it should be noted that such camelized anti-MSLN single domain antibodies of the disclosure, in certain embodiments, are obtained in any suitable manner known in the field (i.e., as indicated under points (1)-(8) above) and thus are not strictly limited to polypeptides that have been obtained using a polypeptide that comprises a naturally occurring VH domain as a starting material. For example, as further described herein, both “humanization” and “camelization” is performed by providing a nucleotide sequence that encodes a naturally occurring VHH domain or VH domain, respectively, and then changing, one or more codons in said nucleotide sequence in such a way that the new nucleotide sequence encodes a “humanized” or “camelized” single domain antibody, respectively. This nucleic acid can then be expressed, so as to provide a desired single domain antibody of the disclosure. Alternatively, in other embodiments, based on the amino acid sequence of a naturally occurring VHH domain or VH domain, respectively, the amino acid sequence of the desired humanized or camelized single domain antibody of the disclosure, respectively, are designed and then synthesized de novo using known techniques for peptide synthesis. In some embodiments, based on the amino acid sequence or nucleotide sequence of a naturally occurring VHH domain or VH domain, respectively, a nucleotide sequence encoding the desired humanized or camelized single domain antibody of the disclosure, respectively, is designed and then synthesized de novo using known techniques for nucleic acid synthesis, after which the nucleic acid thus obtained is expressed in using known expression techniques, so as to provide the desired single domain antibody of the disclosure.

[0066] The terms “patient” or “subject” refers to any single subject for which therapy is desired or that is participating in a clinical trial, epidemiological study or used as a control, including humans and mammalian veterinary patients such as cattle, horses, dogs, and cats.

### Immune Cell Engaging Proteins

[0067] Described herein, in some embodiments, is a combination comprising an immunomodulator and an immune cell engaging protein. In some embodiments, the immune cell engaging protein is a bi-specific protein, a tri-specific protein or a multi-specific protein. In some embodiments, the immune cell engaging protein is a half-life extended protein. In some embodiments, the immune cell engaging protein comprises a domain that binds to a bulk serum protein, e.g., a serum albumin. In some embodiments, the serum albumin is human serum albumin (HSA).

[0068] In some embodiments, the immune cell engaging protein comprises an immune cell engaging domain. In some embodiments “an immune cell engaging domain” as used herein refers to one or more binding specificities that bind and/or activate an immune cell, e.g., a cell involved in an immune response. In some embodiments, the immune cell is selected from an NK cell, a B cell, a dendritic cell, a macrophage cell. The immune cell engaging domain, in some embodiments, is an antibody or an antigen binding fragment thereof, a receptor molecule (e.g., a full length receptor, receptor fragment, or fusion thereof (e.g., a receptor-Fc fusion)), or a ligand molecule (e.g., a full length ligand, ligand fragment, or fusion thereof (e.g., a ligand-Fc fusion)) that binds to the immune cell antigen (e.g., the NK cell antigen, the B cell antigen, the dendritic cell antigen, and/or the macrophage cell antigen). In embodiments, the immune cell engaging domain specifically binds to the target immune cell, e.g., binds preferentially to the target immune cell. For example, in some embodiments the immune cell engaging domain is an antibody or an antigen binding fragment thereof that binds to the immune cell antigen (e.g., the NK cell antigen, the B cell antigen, the dendritic cell antigen, and/or the macrophage cell antigen) with a dissociation constant of less than about 10 nM.

[0069] In some embodiments, the immune cell engaging domain comprises a natural killer (NK) cell engaging domain, a T cell engaging domain, a B cell engaging domain, a dendritic cell engaging domain, a macrophage cell engaging domain, or a combination thereof. In some embodiments, the immune cell engaging protein comprises a T-cell engaging domain. In some embodiments, the T cell engaging domain binds a CD3 molecule. In some embodiments, the CD3 molecule is at least one of: a CD3γ molecule, a CD3δ molecule, or a CD3ε molecule.

[0070] In some embodiments, the immune cell engaging protein comprises an antigen binding domain. In some examples, the antigen binding domain includes antibodies, single chain antibodies, Fabs, Fv, T-cell receptor binding domains, ligand binding domains, receptor binding domains, domain antibodies, single domain antibodies, minibodies, nanobodies, peptibodies, or various other antibody mimics (such as affimers, affitins, alphabodies, atrimers, CTLA4-based molecules, adnectins, anticalins, Kunitz domain-based proteins, avimers, knottins, fynomers, darpins, affibodies, affilins, monobodies and armadillo repeat protein-based proteins).

[0071] In some embodiments, the antigen is a tumor antigen, In some embodiments, the antigen is selected from the group consisting of: CD19 (B-lymphocyte antigen CD19, B-Lymphocyte Surface Antigen B4, T-Cell Surface Antigen Leu-12, CVID3), PSMA (prostate specific membrane antigen), MSLN (mesothelin), BCMA (B-cell maturation antigen), DLL3 (Delta-like ligand 3), EGFR (epidermal growth factor receptor), FLT3 (FMS-like tyrosine kinase 3), CD20 (B-lymphocyte antigen CD20, MS4A1, B1, Bp35, CVID5, LEU-16, MS4A2, S7, membrane spanning 4-domains A1), CD22 (SIGLEC-2, SIGLEC2), CD25 (IL2RA, interleulin-2 receptor alpha chain), CD27 (S152, S152. LPFS2, T14, TNFRSF7, Tp55), CD30 (TNFRSF8), CD33 (Siglec-3, sialic acid binding Ig-like lectin 3, SIGLEC3, SIGLEC-3, gp67, p67), CD37 (GP52-40, TSPAN26), CD38 (cyclic ADP ribose hydrolase, ADPRC1, ADPRC 1), CD40 (Bp50, CDW40, TNFRSF5, p50), CD44 (HCAM, homing cell adhesion molecule), Pgp-1 (phagocytic glycoprotein-1), Hermes antigen, lymphocyte homing receptor, ECM-III, and HUTCH-1), CD48 (BLAST-1, B-lymphocyte activation marker, SLAMF2, signaling lymphocytic activation molecule 2), CD52 (CAMPATH-1 antigen), CD70, CD73 (NT5E, ecto-5′-nucleotidase), CD39 (ENTPD1, Ectonucleoside triphosphate diphosphohydrolase-1), CD74 (HLA class II histocompatibility antigen gamma chain, HLA-DR antigens-associated invariant chain), CD79b (immunoglobulin-associated beta), CD80 (B7-1), CD86 (B7-2), CD123 (IL3RA, interleukin-3 receptor), CD133 (PROM1), CD137 (TNFRSF9, tumor necrosis factor receptor superfamily member 9, 4-1BB, ILA, induced by lymphocyte activation), CD138 (SDC1), alpha fetoprotein (AFP), c-Met; c-Kit; CD371 (CLEC12A, C-type lectin domain family 12 member A, CLL1)); CD370 (CLEC9A, C-type lectin domain containing 9A); cadherin 3 (CDH3, p-cadherin, PCAD); carbonic anhydrase 6 (CA6); carbonic anhydrase 9 (CA9, CAIX); carcinoembryonic antigen related cell adhesion molecule 3 (CEACAM3); carcinoembryonic antigen related cell adhesion molecule 5 (CEACAM5); CD66c (CEACAM6, carcinoembryonic antigen related cell adhesion molecule 6); chorionic somatomammotropin hormone 1 (CSH1, CS1); coagulation factor III, tissue factor (F3, TF); collectin subfamily member 10 (COLEC10); delta like canonical Notch ligand 3 (DLL3); ectonucleotide pyrophosphatase/phosphodiesterase 3 (ENPP3); ephrin A1 (EFNA1); epidermal growth factor receptor (EGFR); EGFR variant III (EGFRvIII); EPH receptor A2 (EPHA2); epithelial cell adhesion molecule (EpCAM); erb-b2 receptor tyrosine kinase 2 (ERBB2, HER2); fibroblast activation protein alpha (FAP); fibroblast growth factor receptor 2 (FGFR2); fibroblast growth factor receptor 3 (FGFR3); folate hydrolase 1 (FOLH1, PSMA); folate receptor 1 (FOLR1, FRa); GD2 ganglioside; glycoprotein NMB (GPNMB, osteoactivin); guanylate cyclase 2C (GUCY2C, GCC); human papillomavirus (HPV) E6; HPV E7; major histocompatibility complex (MHC) class I-presented neoantigens, major histocompatibility complex (MHC) class II-presented neoantigens, major histocompatibility complex, class I, E (HLA-E); major histocompatibility complex, class I, F (HLA-F); major histocompatibility complex, class I, G (HLA-G, MHC-G); integrin subunit beta 7 (ITGB7); leukocyte immunoglobulin like receptor B1 (LILRB1, ILT2); leukocyte immunoglobulin like receptor B2 (LILRB2, ILT4); LY6/PLAUR domain containing 3 (LYPD3, C4.4A); glypican 3 (GPC3); KRAS proto-oncogene, GTPase (KRAS); MAGE family member A1 (MAGEA1); MAGE family member A3 (MAGEA3); MAGE family member A4 (MAGEA4); MAGE family member A11 (MAGEA11); MAGE family member C1 (MAGEC1); MAGE family member C2 (MAGEC2); MAGE family member D1 (MAGED1); MAGE family member D2 (MAGED2); mesothelin (MSLN); mucin 1 (MUC1) and splice variants thereof (e.g., MUC1/C, D, and Z); mucin 16 (MUC16); necdin (NDN); nectin cell adhesion molecule 4 (NECTIN4); SLIT and NTRK like family member 6 (SLITRK6); promyelocytic leukemia (PML, TRIM19); protein tyrosine kinase 7 (inactive) (PTK7); CD352 (SLAMF6, SLAM family member 6); CD319 (SLAMF7, SLAM family member 7, 19A, CRACC, CS1); sialic acid binding Ig like lectin 7 (SIGLEC7); sialic acid binding Ig like lectin 9 (SIGLEC9); solute carrier family 34 (sodium phosphate), member 2 (SLC34A2); solute carrier family 39 member 6 (SLC39A6, LIV1); STEAP family member 1 (STEAP1); STEAP family member 2 (STEAP2); CD134 (TNFRSF4, TNF receptor superfamily member 4, OX40); CD137L (TNFSF9, TNF superfamily member 9, 4-1BB-L); CD261 (TNFRSF10A, TNF receptor superfamily member 10a, DR4, TRAILR1); CD262 (TNFRSF10B, TNF receptor superfamily member 10b, DR5, TRAILR2); CD267 (TNFRSF13B, TNF receptor superfamily member 13B, TACI, IGAD2); CD269 (TNFRSF17, TNF receptor superfamily member 17, BCMA,); CD357 (TNFRSF18, TNF receptor superfamily member 18 GITR); transferrin (TF); transforming growth factor beta 1 (TGFB1); trophoblast glycoprotein (TPBG, 5T4); trophinin (TRO, MAGED3); tumor associated calcium signal transducer 2 (TACSTD2, TROP2, EGP1); Fucosyl GM1; sialyl Lewis adhesion molecule (sLe); ROR1, CD30, and Lewis Y antigen. In some embodiments, the immune cell engaging protein specifically binds to PSMA, MSLN, BCMA, DLL3, EGFR, FLT3, or EpCAM.

[0072] Describe herein is an immune cell engaging protein comprises a first domain (A), which is a T cell engaging domain and specifically binds to human CD3, a second domain (B) which specifically binds to human serum albumin (HSA), and a third domain (C) which specifically binds to a target antigen. In some embodiments, the immune cell engaging protein's domains are linked in one of the following orders: H₂N-(C)-(B)-(A)-COOH, H₂N-(A)-(B)-(C)-COOH, H₂N-(B)-(A)-(C)-COOH, H₂N-(C)-(A)-(B)-COOH, H₂N-(A)-(C)-(B)-COOH, H₂N-(B)-(C)-(A)-COOH, or by linkers L1 and L2 in one of the following orders: H₂N-(C)-L1-(B)-L2(A)-COOH, H₂N-(A)-L1-(B)-L2-(C)-COOH, H₂N-(B)-L1-(A)-L2-(C)-COOH, H₂N-(C)-L1-(A)-L2-(B)-COOH, H₂N-(A)-L1-(C)-L2(B)-COOH, H₂N-(B)-L1-(C)-L2-(A)-COOH. In some embodiments, the linkers L1 and L2 are each independently selected from an amino acid sequence of SEQ ID NOS: 3190-3200.

[0073] In some embodiments, the immune cell engaging protein described herein comprise a polypeptide having a sequence described in SEQ ID NOS: 3218-3462 and subsequences thereof. In some embodiments, the immune cell engaging protein comprises a polypeptide having at least 70%-95% or more homology to a sequence described in SEQ ID NO: 3218-3462. In some embodiments, the immune cell engaging protein comprises a polypeptide having at least 70%, 75%, 80%, 85%, 90%, 95%, or more homology to a sequence described in SEQ ID NO: 3218-3462. In some embodiments, the immune cell engaging protein has a sequence comprising at least a portion of a sequence described in SEQ ID NO: 3218-3462. In some embodiments, the immune cell engaging protein comprises a polypeptide comprising one or more of the sequences described in SEQ ID NO: 3218-3462.

[0074] In some embodiments, the immune cell engaging protein described herein comprise a polypeptide having a sequence described in SEQ ID NOS: 3255, 3340, 3376, and 3462 and subsequences thereof. In some embodiments, the immune cell engaging protein comprises a polypeptide having at least 70%-95% or more homology to a sequence described in SEQ ID NOS: 3255, 3340, 3376, and 3462. In some embodiments, the immune cell engaging protein comprises a polypeptide having at least 70%, 75%, 80%, 85%, 90%, 95%, or more homology to a sequence described in SEQ ID NOS: 3255, 3340, 3376, and 3462. In some embodiments, the immune cell engaging protein has a sequence comprising at least a portion of a sequence described in SEQ ID NOS: 3255, 3340, 3376, and 3462. In some embodiments, the immune cell engaging protein comprises a polypeptide comprising one or more of the sequences described in SEQ ID NOS: 3255, 3340, 3376, and 3462.

### Prostate Specific Membrane Antigen (PSMA) Binding Proteins

[0075] Described herein are immune cell engaging proteins that comprise an PSMA binding domain, pharmaceutical compositions thereof, as well as nucleic acids, recombinant expression vectors and host cells for making such proteins thereof. Also provided are methods of using the disclosed proteins comprising an PSMA binding domain of this disclosure, in the prevention, and/or treatment of diseases, conditions and disorders.

[0076] PSMA is a 100 kD Type II membrane glycoprotein expressed in prostate tissues having sequence identity with the transferrin receptor with NAALADase activity. PSMA is expressed in increased amounts in prostate cancer, and elevated levels of PSMA are also detectable in the sera of these patients. PSMA expression increases with disease progression, becoming highest in metastatic, hormone-refractory disease for which there is no present therapy.

[0077] The design of the PSMA targeting immune cell engaging proteins described herein allows the binding domain to PSMA to be flexible in that the binding domain to PSMA can be any type of binding domain, including but not limited to, domains from a monoclonal antibody, a polyclonal antibody, a recombinant antibody, a human antibody, a humanized antibody. In some embodiments, the binding domain to PSMA is a single chain variable fragments (scFv), single-domain antibody such as a heavy chain variable domain (VH), a light chain variable domain (VL) and a variable domain (VHH) of camelid derived single domain antibody. In other embodiments, the binding domain to PSMA is a non-Ig binding domain, i.e., antibody mimetic, such as anticalins, affilins, affibody molecules, AFFIMERs®, affitins, alphabodies, avimers, DARPins, fynomers, kunitz domain peptides, and monobodies. In further embodiments, the binding domain to PSMA is a ligand or peptide that binds to or associates with PSMA. In yet further embodiments, the binding domain to PSMA is a knottin. In yet further embodiments, the binding domain to PSMA is a small molecular entity.

[0078] In some embodiments, the PSMA binding domain comprises the following formula: f1-r1-f2-r2-f3-r3-f4, wherein r1, r2, and r3 are complementarity determining regions CDR1, CDR2, and CDR3, respectively, and f1, f2, f3, and f4 are framework residues, and wherein r1 comprises SEQ ID NO: 462, SEQ ID NO: 463, SEQ ID NO: 464, or SEQ ID NO: 465, r2 comprises SEQ ID NO: 466, SEQ ID NO: 467, SEQ ID NO: 468, SEQ ID NO: 469, SEQ ID NO: 470, SEQ ID NO: 471, SEQ ID NO: 472, or SEQ ID NO: 473, and r3 comprises SEQ ID NO: 474, or SEQ ID NO: 475.

[0079] In some embodiments, PSMA binding domains described herein comprise a polypeptide having a sequence described in SEQ ID NO: 462-489 and subsequences thereof. In some embodiments, the HSA binding domain comprises a polypeptide having at least 70%-95% or more homology to a sequence described in SEQ ID NO: 462-489. In some embodiments, the HSA binding domain comprises a polypeptide having at least 70%, 75%, 80%, 85%, 90%, 95%, or more homology to a sequence described in SEQ ID NO: 462-489. In some embodiments, the HSA binding domain has a sequence comprising at least a portion of a sequence described in SEQ ID NO: 462-489. In some embodiments, the HSA binding domain comprises a polypeptide comprising one or more of the sequences described in SEQ ID NO: 462-489.

[0080] In some embodiments, PSMA binding domains described herein comprise a single domain antibody with a CDR1 comprising SEQ ID NO: 462-465. In some embodiments, PSMA binding domains described herein comprise a single domain antibody with a CDR2 comprising SEQ ID NO: 466-473. In some embodiments, PSMA binding domains described herein comprise a single domain antibody with a CDR3 comprising SE ID NO: 474 and 475.

### Mesothelin (MSLN) Binding Proteins

[0081] MSLN is a GPI-linked membrane bound tumor antigen. MSLN is overexpressed ovarian, pancreatic, lung and triple-negative breast cancers and mesothelioma. Normal tissue expression of MSLN is restricted to single-cell, mesothelial layers lining the pleural, pericardial, and peritoneal cavities. Overexpression of MSLN is associated with poor prognosis in lung adenocarcinoma and triple-negative breast cancer. MSLN has been used as cancer antigen for numerous modalities, including immunotoxins, vaccines, antibody drug conjugates and CAR-T cells. Early signs of clinical efficacy have validated MSLN as a target, but therapies with improved efficacy are needed to treat MSLN-expressing cancers.

[0082] Mesothelin is a glycoprotein present on the surface of cells of the mesothelial lining of the peritoneal, pleural and pericardial body cavities. The mesothelin gene (MSLN) encodes a 71 kD precursor protein that is processed to a 40 kD protein termed mesothelin, which is a glycosyl-phosphatidylinositol-anchored glycoprotein present on the cell surface (Chang, et al, Proc Natl Acad Sci USA (1996) 93:136-40). The mesothelin cDNA was cloned from a library prepared from the HPC-Y5 cell line (Kojima et al. (1995) J. Biol. Chem. 270:21984-21990). The cDNA also was cloned using the monoclonal antibody K1, which recognizes mesotheliomas (Chang and Pastan (1996) Proc. Natl. Acad. Sci. USA 93:136-40). Mesothelin is a differentiation antigen whose expression in normal human tissues is limited to mesothelial cells lining the body cavity, such as the pleura, pericardium and peritoneum. Mesothelin is also highly expressed in several different human cancers, including mesotheliomas, pancreatic adenocarcinomas, ovarian cancers, stomach and lung adenocarcinomas. (Hassan, et al., Eur J Cancer (2008) 44:46-53) (Ordonez, Am J Surg Pathol (2003) 27:1418-28; Ho, et al., Clin Cancer Res (2007) 13:1571-5). Mesothelin is overexpressed in a vast majority of primary pancreatic adenocarcinomas with rare and weak expression seen in benign pancreatic tissue. Argani P, et al. Clin Cancer Res. 2001; 7(12):3862-3868. Epithelial malignant pleural mesothelioma (MPM) universally expresses mesothelin while sarcomatoid MPM likely does not express mesothelin. Most serous epithelial ovarian carcinomas, and the related primary peritoneal carcinomas, express mesothelin.

[0083] Mesothelin can also be used a marker for diagnosis and prognosis of certain types of cancer because trace amounts of mesothelin can be detected in the blood of some patients with mesothelin-positive cancers (Cristaudo et al., Clin. Cancer Res. 13:5076-5081, 2007). It has been reported that mesothelin may be released into serum through deletion at its carboxyl terminus or by proteolytic cleavage from its membrane bound form (Hassan et al., Clin. Cancer Res. 10:3937-3942, 2004). An increase in the soluble form of mesothelin was detectable several years before malignant mesotheliomas occurred among workers exposed to asbestos (Creaney and Robinson, Hematol. Oncol. Clin. North Am. 19:1025-1040, 2005). Furthermore, patients with ovarian, pancreatic, and lung cancers also have elevated soluble mesothelin in serum (Cristaudo et al., Clin. Cancer Res. 13:5076-5081, 2007; Hassan et al., Clin. Cancer Res. 12:447-453, 2006; Croso et al., Cancer Detect. Prev. 30:180-187, 2006). Accordingly, mesothelin is an appropriate target for methods of disease prevention or treatment and there is a need for effective antibodies specific for mesothelin.

[0084] It has been shown that cell surface mature mesothelin comprises three distinct domains, namely Regions I (comprising residues 296-390), II (comprising residues 391-486), and III (comprising residue 487-598). (Tang et al., A human single-domain antibody elicits potent antitumor activity by targeting an epitope in mesothelin close to the cancer cell surface, Mol. Can. Therapeutics, 12(4): 416-426, 2013). The first antibodies generated against mesothelin for therapeutic intervention were designed to interfere with the interaction between mesothelin and CA-125. Phage display identified the Fv SS, which was affinity optimized and used to generate a recombinant immunotoxin targeting mesothelin, SS1P. The MORAb-009 antibody amatuximab, which also uses SS1, recognizes a non-linear epitope in the amino terminal 64 amino acids of mesothelin, within region I. The SS1 Fv was also used to generate chimeric antigen receptor-engineered T cells. Recently, new anti-mesothelin antibodies have been reported that recognize other regions of the mesothelin protein.

[0085] There is still a need for having available further options for the treatment of solid tumor diseases related to the overexpression of mesothelin, such as ovarian cancer, pancreatic cancer, mesothelioma, lung cancer, gastric cancer and triple negative breast cancer. The present disclosure provides, in certain embodiments, MSLN targeting immune cell engaging proteins containing binding domains which specifically bind to MSLN on the surface of tumor target cells.

[0086] The design of the MSLN targeting immune cell engaging proteins described herein allows the binding domain to MSLN to be flexible in that the binding domain to MSLN can be any type of binding domain, including but not limited to, domains from a monoclonal antibody, a polyclonal antibody, a recombinant antibody, a human antibody, a humanized antibody. In some embodiments, the binding domain to MSLN is a single chain variable fragments (scFv), single-domain antibody such as a heavy chain variable domain (VH), a light chain variable domain (VL) and a variable domain (VHH) of camelid derived single domain antibody. In other embodiments, the binding domain to MSLN is a non-Ig binding domain, i.e., antibody mimetic, such as anticalins, affilins, affibody molecules, affimers, affitins, alphabodies, avimers, DARPins, fynomers, kunitz domain peptides, and monobodies. In further embodiments, the binding domain to MSLN is a ligand or peptide that binds to or associates with MSLN. In yet further embodiments, the binding domain to MSLN is a knottin. In yet further embodiments, the binding domain to MSLN is a small molecular entity.

[0087] In some embodiments, the MSLN binding domain binds to a protein comprising the sequence of SEQ ID NO: 3204. In some embodiments, the MSLN binding domain binds to a protein comprising a truncated sequence compared to SEQ ID NO: 3204.

[0088] In some embodiments, the MSLN binding domains disclosed herein recognize full-length mesothelin. In certain instances, the MSLN binding domains disclosed herein recognize an epitope in region I (comprising amino acid residues 296-390 of SEQ ID NO: 3204), region II (comprising amino acid residue 391-486 of SEQ ID NO: 3204), or region III (comprising amino acid residues 487-598 of SEQ ID NO: 3204) of mesothelin. It is contemplated that the MSLN binding domains of the present disclosure may, in some embodiments, recognize and bind to epitopes that are located outside regions I, II, or III of mesothelin. In yet other embodiments are disclosed MSLN binding domains that recognize and bind to an epitope different than the MORAb-009 antibody.

[0089] In some embodiments, the MSLN binding domain is an anti-MSLN antibody or an antibody variant. As used herein, the term “antibody variant” refers to variants and derivatives of an antibody described herein. In certain embodiments, amino acid sequence variants of the anti-MSLN antibodies described herein are contemplated. For example, in certain embodiments amino acid sequence variants of anti-MSLN antibodies described herein are contemplated to improve the binding affinity and/or other biological properties of the antibodies. Exemplary method for preparing amino acid variants include, but are not limited to, introducing appropriate modifications into the nucleotide sequence encoding the antibody, or by peptide synthesis. Such modifications include, for example, deletions from, and/or insertions into and/or substitutions of residues within the amino acid sequences of the antibody.

[0090] Any combination of deletion, insertion, and substitution can be made to arrive at the final construct, provided that the final construct possesses the desired characteristics, e.g., antigen-binding. In certain embodiments, antibody variants having one or more amino acid substitutions are provided. Sites of interest for substitution mutagenesis include the CDRs and framework regions. Examples of such substitutions are described below. Amino acid substitutions may be introduced into an antibody of interest and the products screened for a desired activity, e.g., retained/improved antigen binding, decreased immunogenicity, or improved T-cell mediated cytotoxicity (TDCC). Both conservative and non-conservative amino acid substitutions are contemplated for preparing the antibody variants.

[0091] In another example of a substitution to create a variant anti-MSLN antibody, one or more hypervariable region residues of a parent antibody are substituted. In general, variants are then selected based on improvements in desired properties compared to a parent antibody, for example, increased affinity, reduced affinity, reduced immunogenicity, increased pH dependence of binding.

[0092] In some embodiments, the MSLN binding domain of the MSLN targeting immune cell engaging protein is a single domain antibody such as a heavy chain variable domain (VH), a variable domain (VHH) of a llama derived sdAb, a peptide, a ligand or a small molecule entity specific for mesothelin. In some embodiments, the mesothelin binding domain of the MSLN targeting immune cell engaging protein described herein is any domain that binds to mesothelin including but not limited to domains from a monoclonal antibody, a polyclonal antibody, a recombinant antibody, a human antibody, a humanized antibody. In certain embodiments, the MSLN binding domain is a single-domain antibody. In other embodiments, the MSLN binding domain is a peptide. In further embodiments, the MSLN binding domain is a small molecule.

[0093] In one embodiment, a single domain antibody corresponds to the VHH domains of naturally occurring heavy chain antibodies directed against MSLN. As further described herein, such VHH sequences can generally be generated or obtained by suitably immunizing a species of Llama with MSLN, (i.e., so as to raise an immune response and/or heavy chain antibodies directed against MSLN), by obtaining a suitable biological sample from said Llama (such as a blood sample, serum sample or sample of B-cells), and by generating VHH sequences directed against MSLN, starting from said sample, using any suitable technique known in the field.

[0094] In another embodiment, such naturally occurring VHH domains against MSLN, are obtained from naïve libraries of Camelid VHH sequences, for example by screening such a library using MSLN, or at least one part, fragment, antigenic determinant or epitope thereof using one or more screening techniques known in the field. Such libraries and techniques are for example described in WO 99/37681, WO 01/90190, WO 03/025020 and WO 03/035694. Alternatively, improved synthetic or semi-synthetic libraries derived from naïve VHH libraries are used, such as VHH libraries obtained from naïve VHH libraries by techniques such as random mutagenesis and/or CDR shuffling, as for example described in WO 00/43507.

[0095] In a further embodiment, yet another technique for obtaining VHH sequences directed against MSLN, involves suitably immunizing a transgenic mammal that is capable of expressing heavy chain antibodies (i.e., so as to raise an immune response and/or heavy chain antibodies directed against MSLN), obtaining a suitable biological sample from said transgenic mammal (such as a blood sample, serum sample or sample of B-cells), and then generating VHH sequences directed against MSLN, starting from said sample, using any suitable technique known in the field. For example, for this purpose, the heavy chain antibody-expressing rats or mice and the further methods and techniques described in WO 02/085945 and in WO 04/049794 can be used.

[0096] In some embodiments, an anti-MSLN single domain antibody of the MSLN targeting immune cell engaging protein comprises a single domain antibody with an amino acid sequence that corresponds to the amino acid sequence of a naturally occurring VHH domain, but that has been “humanized”, i.e., by replacing one or more amino acid residues in the amino acid sequence of said naturally occurring VHH sequence (and in particular in the framework sequences) by one or more of the amino acid residues that occur at the corresponding position(s) in a VH domain from a conventional 4-chain antibody from a human being (e.g., as indicated above).

[0097] Other suitable methods and techniques for obtaining the anti-MSLN single domain antibody of the disclosure and/or nucleic acids encoding the same, starting from naturally occurring VH sequences or VHH sequences for example comprises combining one or more parts of one or more naturally occurring VH sequences (such as one or more framework (FR) sequences and/or complementarity determining region (CDR) sequences), one or more parts of one or more naturally occurring VHH sequences (such as one or more FR sequences or CDR sequences), and/or one or more synthetic or semi-synthetic sequences, in a suitable manner, so as to provide an anti-MSLN single domain antibody of the disclosure or a nucleotide sequence or nucleic acid encoding the same.

[0098] In some embodiments, the MSLN binding domain is an anti-MSLN specific antibody comprising a heavy chain variable complementarity determining region CDR1, a heavy chain variable CDR2, a heavy chain variable CDR3, a light chain variable CDR1, a light chain variable CDR2, and a light chain variable CDR3. In some embodiments, the MSLN binding domain comprises any domain that binds to MSLN including but not limited to domains from a monoclonal antibody, a polyclonal antibody, a recombinant antibody, a human antibody, a humanized antibody, or antigen binding fragments such as single domain antibodies (sdAb), Fab, Fab′, F(ab)2, and Fv fragments, fragments comprised of one or more CDRs, single-chain antibodies (e.g., single chain Fv fragments (scFv)), disulfide stabilized (dsFv) Fv fragments, heteroconjugate antibodies (e.g., bispecific antibodies), pFv fragments, heavy chain monomers or dimers, light chain monomers or dimers, and dimers consisting of one heavy chain and one light chain. In some embodiments, the MSLN binding domain is a single domain antibody. In some embodiments, the anti-MSLN single domain antibody comprises heavy chain variable complementarity determining regions (CDR), CDR1, CDR2, and CDR3.

[0099] In some embodiments, the MSLN binding domain is a polypeptide comprising an amino acid sequence that is comprised of four framework regions/sequences (f1-f4) interrupted by three complementarity determining regions/sequences, as represented by the formula: f1-r1-f2-r2-f3-r3-f4, wherein r1, r2, and r3 are complementarity determining regions CDR1, CDR2, and CDR3, respectively, and f1, f2, f3, and f4 are framework residues. The framework residues of the MSLN binding protein of the present disclosure comprise, for example, 75, 76, 77, 78, 79, 80, 81, 82, 83, 84, 85, 86, 87, 88, 89, 90, 91, 92, 93, or 94 amino acid residues, and the complementarity determining regions comprise, for example, 24, 25, 26, 27, 28, 29, 30, 31, 32, 33, 34, 35, or 36 amino acid residues. In some embodiments, the MSLN binding domain comprises an amino acid sequence selected from the group consisting of SEQ ID NOS: 607-650.

[0100] In some embodiments, the CDR1 comprises the amino acid sequence as set forth in SEQ ID NO: 490 or a variant having one, two, three, four, five, six, seven, eight, nine, or ten amino acid substitutions in SEQ ID NO: 490. In some embodiments, the CDR2 comprises a sequence as set forth in SEQ ID NO: 3505 or a variant having one, two, three, four, five, six, seven, eight, nine, or ten amino acid substitutions in SEQ ID NO: 3505. In some embodiments, the CDR3 comprises a sequence as set forth in SEQ ID NO: 3506 or a variant having one, two, three, four, five, six, seven, eight, nine, or ten amino acid substitutions in SEQ ID NO: 3506.

[0101] In some embodiments, the CDR1 comprises the amino acid sequence as set forth in SEQ ID NO: 518 or a variant having one, two, three, four, five, six, seven, eight, nine, or ten amino acid substitutions in SEQ ID NO: 518. In some embodiments, the CDR2 comprises a sequence as set forth in SEQ ID NO: 3507 or a variant having one, two, three, four, five, six, seven, eight, nine, or ten amino acid substitutions in SEQ ID NO: 3507. In some embodiments, the CDR3 comprises a sequence as set forth in SEQ ID NO: 3508 or a variant having one, two, three, four, five, six, seven, eight, nine, or ten amino acid substitutions in SEQ ID NO: 3508.

[0102] In some embodiments, the CDR1 comprises the amino acid sequence as set forth in any one of SEQ ID NOS: 490-528 or a variant having one, two, three, four, five, six, seven, eight, nine, or ten amino acid substitutions in any one of SEQ ID NOS: 490-528. In some embodiments, the CDR2 comprises a sequence as set forth in any one of SEQ ID NOS: 529-567 or a variant having one, two, three, four, five, six, seven, eight, nine, or ten amino acid substitutions in any one of SEQ ID NOS: 529-567. In some embodiments, the CDR3 comprises a sequence as set forth in any one of SEQ ID NOS: 568-606 or a variant having one, two, three, four, five, six, seven, eight, nine, or ten amino acid substitutions in any one of SEQ ID NOS: 568-606.

[0103] In various embodiments, the MSLN binding domain of the present disclosure is at least about 75%, about 76%, about 77%, about 78%, about 79%, about 80%, about 81%, about 82%, about 83%, about 84%, about 85%, about 86%, about 87%, about 88%, about 89%, about 90%, about 91%, about 92%, about 93%, about 94%, about 95%, about 96%, about 97%, about 98%, about 99%, or about 100% identical to an amino acid sequence selected from the group consisting of SEQ ID NOS: 607-650.

[0104] In various embodiments, a complementarity determining region of the MSLN binding domain of the present disclosure is at least about 10%, about 20%, about 30%, about 40%, about 50%, about 60%, about 70%, about 80%, about 81%, about 82%, about 83%, about 84%, about 85%, about 86%, about 87%, about 88%, about 89%, about 90%, about 91%, about 92%, about 93%, about 94%, about 95%, about 96%, about 97%, about 98%, about 99%, or about 100% identical to the amino acid sequence set forth in SEQ ID NO: 490, SEQ ID NO: 518, or any one of SEQ ID NOS: 490-528.

[0105] In various embodiments, a complementarity determining region of the MSLN binding domain of the present disclosure is at least about 10%, about 20%, about 30%, about 40%, about 50%, about 60%, about 70%, about 80%, about 81%, about 82%, about 83%, about 84%, about 85%, about 86%, about 87%, about 88%, about 89%, about 90%, about 91%, about 92%, about 93%, about 94%, about 95%, about 96%, about 97%, about 98%, about 99%, or about 100% identical to the amino acid sequence set forth in SEQ ID NO: 3505, SEQ ID NO: 3507, or any one of SEQ ID NOS: 529-567.

[0106] In various embodiments, a complementarity determining region of the MSLN binding domain of the present disclosure is at least about 10%, about 20%, about 30%, about 40%, about 50%, about 60%, about 70%, about 80%, about 81%, about 82%, about 83%, about 84%, about 85%, about 86%, about 87%, about 88%, about 89%, about 90%, about 91%, about 92%, about 93%, about 94%, about 95%, about 96%, about 97%, about 98%, about 99%, or about 100% identical to the amino acid sequence set forth in SEQ ID NO: 3506, SEQ ID NO: 3508, or any one of SEQ ID NOS: 568-606.

[0107] In some embodiments, the MSLN binding protein, according to any one of the above embodiments, is a single domain antibody comprising the sequence of SEQ ID NO: 607. In some embodiments, the MSLN binding protein, according to any one of the above embodiments, is a single domain antibody comprising the sequence of SEQ ID NO: 608. In some embodiments, the MSLN binding protein, according to any one of the above embodiments, is a single domain antibody comprising the sequence of SEQ ID NO: 609. In some embodiments, the MSLN binding protein, according to any one of the above embodiments, is a single domain antibody comprising the sequence of SEQ ID NO: 610. In some embodiments, the MSLN binding protein, according to any one of the above embodiments, is a single domain antibody comprising the sequence of SEQ ID NO: 611. In some embodiments, the MSLN binding protein, according to any one of the above embodiments, is a single domain antibody comprising the sequence of SEQ ID NO: 612. In some embodiments, the MSLN binding protein, according to any one of the above embodiments, is a single domain antibody comprising the sequence of SEQ ID NO: 613. In some embodiments, the MSLN binding protein, according to any one of the above embodiments, is a single domain antibody comprising the sequence of SEQ ID NO: 614. In some embodiments, the MSLN binding protein, according to any one of the above embodiments, is a single domain antibody comprising the sequence of SEQ ID NO: 615. In some embodiments, the MSLN binding protein, according to any one of the above embodiments, is a single domain antibody comprising the sequence of SEQ ID NO: 616. In some embodiments, the MSLN binding protein, according to any one of the above embodiments, is a single domain antibody comprising the sequence of SEQ ID NO: 617. In some embodiments, the MSLN binding protein, according to any one of the above embodiments, is a single domain antibody comprising the sequence of SEQ ID NO: 618. In some embodiments, the MSLN binding protein, according to any one of the above embodiments, is a single domain antibody comprising the sequence of SEQ ID NO: 619. In some embodiments, the MSLN binding protein, according to any one of the above embodiments, is a single domain antibody comprising the sequence of SEQ ID NO: 620. In some embodiments, the MSLN binding protein, according to any one of the above embodiments, is a single domain antibody comprising the sequence of SEQ ID NO: 621. In some embodiments, the MSLN binding protein, according to any one of the above embodiments, is a single domain antibody comprising the sequence of SEQ ID NO: 622. In some embodiments, the MSLN binding protein, according to any one of the above embodiments, is a single domain antibody comprising the sequence of SEQ ID NO: 623. In some embodiments, the MSLN binding protein, according to any one of the above embodiments, is a single domain antibody comprising the sequence of SEQ ID NO: 624. In some embodiments, the MSLN binding protein, according to any one of the above embodiments, is a single domain antibody comprising the sequence of SEQ ID NO: 625. In some embodiments, the MSLN binding protein, according to any one of the above embodiments, is a single domain antibody comprising the sequence of SEQ ID NO: 626. In some embodiments, the MSLN binding protein, according to any one of the above embodiments, is a single domain antibody comprising the sequence of SEQ ID NO: 627. In some embodiments, the MSLN binding protein, according to any one of the above embodiments, is a single domain antibody comprising the sequence of SEQ ID NO: 628. In some embodiments, the MSLN binding protein, according to any one of the above embodiments, is a single domain antibody comprising the sequence of SEQ ID NO: 629. In some embodiments, the MSLN binding protein, according to any one of the above embodiments, is a single domain antibody comprising the sequence of SEQ ID NO: 630. In some embodiments, the MSLN binding protein, according to any one of the above embodiments, is a single domain antibody comprising the sequence of SEQ ID NO: 631. In some embodiments, the MSLN binding protein, according to any one of the above embodiments, is a single domain antibody comprising the sequence of SEQ ID NO: 632. In some embodiments, the MSLN binding protein, according to any one of the above embodiments, is a single domain antibody comprising the sequence of SEQ ID NO: 633. In some embodiments, the MSLN binding protein, according to any one of the above embodiments, is a single domain antibody comprising the sequence of SEQ ID NO: 634. In some embodiments, the MSLN binding protein, according to any one of the above embodiments, is a single domain antibody comprising the sequence of SEQ ID NO: 635.

[0108] In some embodiments, the MSLN binding protein, according to any one of the above embodiments, is a humanized single domain antibody comprising the sequence of SEQ ID NO: 636. In some embodiments, the MSLN binding protein, according to any one of the above embodiments, is a humanized single domain antibody comprising the sequence of SEQ ID NO: 637. In some embodiments, the MSLN binding protein, according to any one of the above embodiments, is a humanized single domain antibody comprising the sequence of SEQ ID NO: 638. In some embodiments, the MSLN binding protein, according to any one of the above embodiments, is a humanized single domain antibody comprising the sequence of SEQ ID NO: 639. In some embodiments, the MSLN binding protein, according to any one of the above embodiments, is a humanized single domain antibody comprising the sequence of SEQ ID NO: 640. In some embodiments, the MSLN binding protein, according to any one of the above embodiments, is a humanized single domain antibody comprising the sequence of SEQ ID NO: 641. In some embodiments, the MSLN binding protein, according to any one of the above embodiments, is a humanized single domain antibody comprising the sequence of SEQ ID NO: 642. In some embodiments, the MSLN binding protein, according to any one of the above embodiments, is a humanized single domain antibody comprising the sequence of SEQ ID NO: 643. In some embodiments, the MSLN binding protein, according to any one of the above embodiments, is a humanized single domain antibody comprising the sequence of SEQ ID NO: 644. In some embodiments, the MSLN binding protein, according to any one of the above embodiments, is a humanized single domain antibody comprising the sequence of SEQ ID NO: 645. In some embodiments, the MSLN binding protein, according to any one of the above embodiments, is a humanized single domain antibody comprising the sequence of SEQ ID NO: 646. In some embodiments, the MSLN binding protein, according to any one of the above embodiments, is a humanized single domain antibody comprising the sequence of SEQ ID NO: 647. In some embodiments, the MSLN binding protein, according to any one of the above embodiments, is a humanized single domain antibody comprising the sequence of SEQ ID NO: 648. In some embodiments, the MSLN binding protein, according to any one of the above embodiments, is a humanized single domain antibody comprising the sequence of SEQ ID NO: 649. In some embodiments, the MSLN binding protein, according to any one of the above embodiments, is a humanized single domain antibody comprising the sequence of SEQ ID NO: 650.

[0109] In some embodiments, the MSLN binding domain is cross-reactive with human and cynomolgus mesothelin. In some embodiments, the MSLN binding domain is specific for human mesothelin. In certain embodiments, the MSLN binding domains disclosed herein bind to human mesothelin with a human Kd (hKd). In certain embodiments, the MSLN binding domains disclosed herein bind to cynomolgus mesothelin with a cyno Kd (cKd). In certain embodiments, the MSLN binding domains disclosed herein bind to both cynomolgus mesothelin and a human mesothelin, with a cyno Kd (cKd) and a human Kd (hKd), respectively. In some embodiments, the MSLN binding protein binds to human and cynomolgus mesothelin with comparable binding affinities (i.e., hKd and cKd values do not differ by more than ±10%). In some embodiments, the hKd and the cKd range from about 0.1 nM to about 500 nM. In some embodiments, the hKd and the cKd range from about 0.1 nM to about 450 nM. In some embodiments, the hKd and the cKd range from about 0.1 nM to about 400 nM. In some embodiments, the hKd and the cKd range from about 0.1 nM to about 350 nM. In some embodiments, the hKd and the cKd range from about 0.1 nM to about 300 nM. In some embodiments, the hKd and the cKd range from about 0.1 nM to about 250 nM. In some embodiments, the hKd and the cKd range from about 0.1 nM to about 200 nM. In some embodiments, the hKd and the cKd range from about 0.1 nM to about 150 nM. In some embodiments, the hKd and the cKd range from about 0.1 nM to about 100 nM. In some embodiments, the hKd and the cKd range from about 0.1 nM to about 90 nM. In some embodiments, the hKd and the cKd range from about 0.2 nM to about 80 nM. In some embodiments, the hKd and the cKd range from about 0.3 nM to about 70 nM. In some embodiments, the hKd and the cKd range from about 0.4 nM to about 50 nM. In some embodiments, the hKd and the cKd range from about 0.5 nM to about 30 nM. In some embodiments, the hKd and the cKd range from about 0.6 nM to about 10 nM. In some embodiments, the hKd and the cKd range from about 0.7 nM to about 8 nM. In some embodiments, the hKd and the cKd range from about 0.8 nM to about 6 nM. In some embodiments, the hKd and the cKd range from about 0.9 nM to about 4 nM. In some embodiments, the hKd and the cKd range from about 1 nM to about 2 nM.

[0110] In some embodiments, any of the foregoing MSLN binding domains (e.g., anti-MSLN single domain antibodies of SEQ ID NOS: 607-646) are affinity peptide tagged for ease of purification. In some embodiments, the affinity peptide tag is six consecutive histidine residues, also referred to as 6X-his (SEQ ID NO: 3503).

[0111] In certain embodiments, the MSLN binding domains of the present disclosure preferentially bind membrane bound mesothelin over soluble mesothelin. Membrane bound mesothelin refers to the presence of mesothelin in or on the cell membrane surface of a cell that expresses mesothelin. Soluble mesothelin refers to mesothelin that is no longer on in or on the cell membrane surface of a cell that expresses or expressed mesothelin. In certain instances, the soluble mesothelin is present in the blood and/or lymphatic circulation in a subject. In one embodiment, the MSLN binding domains bind membrane-bound mesothelin at least 5 fold, 10 fold, 15 fold, 20 fold, 25 fold, 30 fold, 40 fold, 50 fold, 100 fold, 500 fold, or 1000 fold greater than soluble mesothelin. In one embodiment, the MSLN targeting immune cell engaging proteins of the present disclosure preferentially bind membrane-bound mesothelin 30 fold greater than soluble mesothelin. Determining the preferential binding of an antigen binding protein to membrane bound MSLN over soluble MSLN can be readily determined using assays well known in the art.

### B Cell Maturation Antigen (BCMA) Binding Proteins

[0112] B cell maturation antigen (BCMA, TNFRSF17, CD269) is a transmembrane protein belonging to the tumor necrosis family receptor (TNFR) super family that is primarily expressed on terminally differentiated B cells. BCMA expression is restricted to the B cell lineage and mainly present on plasma cells and plasmablasts and to some extent on memory B cells, but virtually absent on peripheral and naive B cells. BCMA is also expressed on multiple myeloma (MM) cells, on leukemia cells and lymphoma cells.

[0113] BCMA was identified through molecular analysis of a t(4;16)(q26;p13) translocation found in a human intestinal T cell lymphoma and an in-frame sequence was mapped to the 16p13.1 chromosome band.

[0114] Human BCMA cDNA has an open reading frame of 552 bp that encodes a 184 amino acid polypeptide. The BCMA gene is organized into three exons that are separated by two introns, each flanked by GT donor and AG acceptor consensus splicing sites, and codes for a transcript of 1.2 kb. The structure of BCMA protein includes an integral transmembrane protein based on a central 24 amino acid hydrophobic region in an alpha-helix structure.

[0115] The murine BCMA gene is located on chromosome 16 syntenic to the human 1⁶p13 region, and also includes three exons that are separated by two introns. The gene encodes a 185 amino acid protein. Murine BCMA mRNA is expressed as a 404 bp transcript at the highest levels in plasmacytoma cells (J558) and at modest levels in the A20 B cell lymphoma line. Murine BCMA mRNA transcripts have also been detected at low levels in T cell lymphoma (EL4, BW5147) and dendritic cell (CB1D6, D2SC1) lines in contrast to human cell lines of T cell and dendritic cell origin. The murine BCMA cDNA sequence has 69.3% nucleotide identity with the human BCMA cDNA sequence and slightly higher identity (73.7%) when comparing the coding regions between these two cDNA sequences. Mouse BCMA protein is 62% identical to human BCMA protein and, like human BCMA, contains a single hydrophobic region, which may be an internal transmembrane segment. The N-terminal 40 amino acid domain of both murine and human BCMA protein have six conserved cysteine residues, consistent with the formation of a cysteine repeat motif found in the extracellular domain of TNFRs. Similar to members of the TNFR superfamily, BCMA protein contains a conserved aromatic residue four to six residues C-terminal from the first cysteine.

[0116] BCMA is not expressed at the cell surface, but rather, is located on the Golgi apparatus. The amount of BCMA expression is proportional to the stage of cellular differentiation (highest in plasma cells).

[0117] BCMA is involved in B cell development and homeostasis due to its interaction with its ligands BAFF (B cell activating factor, also designated as TALL-1 or TNFSF13B) and APRIL (A proliferation inducing ligand). BCMA regulates different aspects of humoral immunity, B cell development and homeostasis along with its family members TACI (transmembrane activator and cyclophylin ligand interactor) and BAFF-R (B cell activation factor receptor, also known as tumor necrosis factor receptor superfamily member 13C). Expression of BCMA appears rather late in B cell differentiation and contributes to the long-term survival of plasmablasts and plasma cells in the bone marrow. BCMA also supports growth and survival of multiple myeloma (MM) cells. BCMA is mostly known for its functional activity in mediating the survival of plasma cells that maintain long-term humoral immunity.

[0118] There is a need for having treatment options for solid tumor diseases related to the overexpression of BCMA, such as cancer multiple myeloma, leukemias and lymphomas. The present disclosure provides, in certain embodiments, single domain proteins which specifically bind to BCMA on the surface of tumor target cells.

[0119] The design of the BCMA targeting immune cell engaging proteins described herein allows the binding domain to BCMA to be flexible in that the binding domain to BCMA can be any type of binding domain, including but not limited to, domains from a monoclonal antibody, a polyclonal antibody, a recombinant antibody, a human antibody, a humanized antibody. In some embodiments, the binding domain to BCMA is a single chain variable fragments (scFv), single-domain antibody such as a heavy chain variable domain (VH), a light chain variable domain (VL) and a variable domain (VHH) of camelid derived single domain antibody. In other embodiments, the binding domain to BCMA is a non-Ig binding domain, i.e., antibody mimetic, such as anticalins, affilins, affibody molecules, affimers, affitins, alphabodies, avimers, DARPins, fynomers, kunitz domain peptides, and monobodies. In further embodiments, the binding domain to BCMA is a ligand or peptide that binds to or associates with BCMA. In yet further embodiments, the binding domain to BCMA is a knottin. In yet further embodiments, the binding domain to BCMA is a small molecular entity.

[0120] In some embodiments, the BCMA binding domain binds to a protein comprising the sequence of SEQ ID NO: 3201, 3202 or 3203. In some embodiments, the BCMA binding domain binds to a protein comprising a truncated sequence compared to SEQ ID NO: 3201, 3202 or 3203.

[0121] In some embodiments, the BCMA binding domain is an anti-BCMA antibody or an antibody variant. As used herein, the term “antibody variant” refers to variants and derivatives of an antibody described herein. In certain embodiments, amino acid sequence variants of the anti-BCMA antibodies described herein are contemplated. For example, in certain embodiments amino acid sequence variants of anti-BCMA antibodies described herein are contemplated to improve the binding affinity and/or other biological properties of the antibodies. Exemplary method for preparing amino acid variants include, but are not limited to, introducing appropriate modifications into the nucleotide sequence encoding the antibody, or by peptide synthesis. Such modifications include, for example, deletions from, and/or insertions into and/or substitutions of residues within the amino acid sequences of the antibody.

[0122] Any combination of deletion, insertion, and substitution can be made to arrive at the final construct, provided that the final construct possesses the desired characteristics, e.g., antigen-binding. In certain embodiments, antibody variants having one or more amino acid substitutions are provided. Sites of interest for substitution mutagenesis include the CDRs and framework regions. Examples of such substitutions are described below. Amino acid substitutions may be introduced into an antibody of interest and the products screened for a desired activity, e.g., retained/improved antigen binding, decreased immunogenicity, or improved T-cell mediated cytotoxicity (TDCC). Both conservative and non-conservative amino acid substitutions are contemplated for preparing the antibody variants.

[0123] In another example of a substitution to create a variant anti-BCMA antibody, one or more hypervariable region residues of a parent antibody are substituted. In general, variants are then selected based on improvements in desired properties compared to a parent antibody, for example, increased affinity, reduced affinity, reduced immunogenicity, increased pH dependence of binding.

[0124] In some embodiments, the BCMA binding domain of the BCMA targeting immune cell engaging protein is a single domain antibody such as a heavy chain variable domain (VH), a variable domain (VHH) of a llama derived sdAb, a peptide, a ligand or a small molecule entity specific for BCMA. In some embodiments, the BCMA binding domain of the BCMA targeting immune cell engaging protein described herein is any domain that binds to BCMA including but not limited to domains from a monoclonal antibody, a polyclonal antibody, a recombinant antibody, a human antibody, a humanized antibody. In certain embodiments, the BCMA binding domain is a single-domain antibody. In other embodiments, the BCMA binding domain is a peptide. In further embodiments, the BCMA binding domain is a small molecule.

[0125] In one embodiment, a single domain antibody corresponds to the VHH domains of naturally occurring heavy chain antibodies directed against BCMA. As further described herein, such VHH sequences can generally be generated or obtained by suitably immunizing a species of Llama with BCMA, (i.e., so as to raise an immune response and/or heavy chain antibodies directed against BCMA), by obtaining a suitable biological sample from said Llama (such as a blood sample, serum sample or sample of B-cells), and by generating VHH sequences directed against BCMA, starting from said sample, using any suitable technique known in the field.

[0126] In another embodiment, such naturally occurring VHH domains against BCMA, are obtained from naïve libraries of Camelid VHH sequences, for example by screening such a library using BCMA, or at least one part, fragment, antigenic determinant or epitope thereof using one or more screening techniques known in the field. Such libraries and techniques are for example described in WO 99/37681, WO 01/90190, WO 03/025020 and WO 03/035694. Alternatively, improved synthetic or semi-synthetic libraries derived from naïve VHH libraries are used, such as VHH libraries obtained from naïve VHH libraries by techniques such as random mutagenesis and/or CDR shuffling, as for example described in WO 00/43507.

[0127] In a further embodiment, yet another technique for obtaining VHH sequences directed against BCMA, involves suitably immunizing a transgenic mammal that is capable of expressing heavy chain antibodies (i.e., so as to raise an immune response and/or heavy chain antibodies directed against BCMA), obtaining a suitable biological sample from said transgenic mammal (such as a blood sample, serum sample or sample of B-cells), and then generating VHH sequences directed against BCMA, starting from said sample, using any suitable technique known in the field. For example, for this purpose, the heavy chain antibody-expressing rats or mice and the further methods and techniques described in WO 02/085945 and in WO 04/049794 can be used.

[0128] In some embodiments, an anti-BCMA single domain antibody of the BCMA targeting immune cell engaging protein comprises a single domain antibody with an amino acid sequence that corresponds to the amino acid sequence of a naturally occurring VHH domain, but that has been “humanized”, i.e., by replacing one or more amino acid residues in the amino acid sequence of said naturally occurring VHH sequence (and in particular in the framework sequences) by one or more of the amino acid residues that occur at the corresponding position(s) in a VH domain from a conventional 4-chain antibody from a human being (e.g., as indicated above).

[0129] Other suitable methods and techniques for obtaining the anti-BCMA single domain antibody of the disclosure and/or nucleic acids encoding the same, starting from naturally occurring VH sequences or VHH sequences for example comprises combining one or more parts of one or more naturally occurring VH sequences (such as one or more framework (FR) sequences and/or complementarity determining region (CDR) sequences), one or more parts of one or more naturally occurring VHH sequences (such as one or more FR sequences or CDR sequences), and/or one or more synthetic or semi-synthetic sequences, in a suitable manner, so as to provide an anti-BCMA single domain antibody of the disclosure or a nucleotide sequence or nucleic acid encoding the same.

[0130] In some embodiments, the BCMA binding domain is an anti-BCMA specific antibody comprising a heavy chain variable complementarity determining region CDR1, a heavy chain variable CDR2, a heavy chain variable CDR3, a light chain variable CDR1, a light chain variable CDR2, and a light chain variable CDR3. In some embodiments, the BCMA binding domain comprises any domain that binds to BCMA including but not limited to domains from a monoclonal antibody, a polyclonal antibody, a recombinant antibody, a human antibody, a humanized antibody, or antigen binding fragments such as single domain antibodies (sdAb), Fab, Fab′, F(ab)2, and Fv fragments, fragments comprised of one or more CDRs, single-chain antibodies (e.g., single chain Fv fragments (scFv)), disulfide stabilized (dsFv) Fv fragments, heteroconjugate antibodies (e.g., bispecific antibodies), pFv fragments, heavy chain monomers or dimers, light chain monomers or dimers, and dimers consisting of one heavy chain and one light chain. In some embodiments, the BCMA binding domain is a single domain antibody. In some embodiments, the anti-BCMA single domain antibody comprises heavy chain variable complementarity determining regions (CDR), CDR1, CDR2, and CDR3.

[0131] In some embodiments, the BCMA binding protein of the present disclosure is a polypeptide comprising an amino acid sequence that is comprised of four framework regions/sequences (f1-f4) interrupted by three complementarity determining regions/sequences, as represented by the formula: f1-r1-f2-r2-f3-r3-f4, wherein r1, r2, and r3 are complementarity determining regions CDR1, CDR2, and CDR3, respectively, and f1, f2, f3, and f4 are framework residues. The r1 residues of the BCMA binding protein of the present disclosure comprise, for example, amino acid residues 26, 27, 28, 29, 30, 31, 32, 33 and 34; the r2 residues of the BCMA binding protein of the present disclosure comprise, for example, amino acid residues, for example, 50, 51, 52, 53, 54, 55, 56, 57, 58, 59, 60, 61, 62 and 63; and the r3 residues of the BCMA binding protein of the present disclosure comprise, for example, amino acid residues, for example, 97, 98, 99, 100, 101, 102, 103, 104, 105, 106, 107 and 108. In some embodiments, the BCMA binding protein comprises an amino acid sequence selected from the group consisting of SEQ ID NOS: 346-460.

[0132] In some embodiments, an exemplary CDR1 comprises the amino acid sequence as set forth in SEQ ID NO: 1-115. In some embodiments, another exemplary CDR2 comprises the amino acid sequence as set forth in SEQ ID NO: 116-230. In some embodiments, another exemplary CDR3 comprises the amino acid sequence as set forth in SEQ ID NO: 231-345.

[0133] In various embodiments, the BCMA binding protein of the present disclosure has a CDR1 that has an amino acid sequence that is at least about 75%, about 76%, about 77%, about 78%, about 79%, about 80%, about 81%, about 82%, about 83%, about 84%, about 85%, about 86%, about 87%, about 88%, about 89%, about 90%, about 91%, about 92%, about 93%, about 94%, about 95%, about 96%, about 97%, about 98%, about 99%, or about 100% identical to an amino acid sequence selected from the group consisting of SEQ ID NOS: 1-115.

[0134] In various embodiments, the BCMA binding protein of the present disclosure has a CDR2 that has an amino acid sequence that is at least about 75%, about 76%, about 77%, about 78%, about 79%, about 80%, about 81%, about 82%, about 83%, about 84%, about 85%, about 86%, about 87%, about 88%, about 89%, about 90%, about 91%, about 92%, about 93%, about 94%, about 95%, about 96%, about 97%, about 98%, about 99%, or about 100% identical to an amino acid sequence selected from the group consisting of SEQ ID NOS: 116-230.

[0135] In various embodiments, a complementarity determining region of the BCMA binding protein of the present disclosure has a CDR3 that has an amino acid sequence that is at least about 10%, about 20%, about 30%, about 40%, about 50%, about 60%, about 70%, about 80%, about 81%, about 82%, about 83%, about 84%, about 85%, about 86%, about 87%, about 88%, about 89%, about 90%, about 91%, about 92%, about 93%, about 94%, about 95%, about 96%, about 97%, about 98%, about 99%, or about 100% identical to an amino acid sequence selected from the group consisting of SEQ ID NOS: 231-345.

[0136] In various embodiments, a BCMA binding protein of the present disclosure has an amino acid sequence that is at least about 10%, about 20%, about 30%, about 40%, about 50%, about 60%, about 70%, about 80%, about 81%, about 82%, about 83%, about 84%, about 85%, about 86%, about 87%, about 88%, about 89%, about 90%, about 91%, about 92%, about 93%, about 94%, about 95%, about 96%, about 97%, about 98%, about 99%, or about 100% identical to an amino acid sequence selected from the group consisting of SEQ ID NOS: 346-460.

[0137] In some embodiments, the BCMA binding protein is a single domain antibody comprising the sequence of SEQ ID NO: 346. In some embodiments, the BCMA binding protein is a single domain antibody comprising the sequence of SEQ ID NO: 347. In some embodiments, the BCMA binding protein is a single domain antibody comprising the sequence of SEQ ID NO: 348. In some embodiments, the BCMA binding protein is a single domain antibody comprising the sequence of SEQ ID NO: 349. In some embodiments, the BCMA binding protein is a single domain antibody comprising the sequence of SEQ ID NO: 350. In some embodiments, the BCMA binding protein is a single domain antibody comprising the sequence of SEQ ID NO: 351. In some embodiments, the BCMA binding protein is a single domain antibody comprising the sequence of SEQ ID NO: 352. In some embodiments, the BCMA binding protein is a single domain antibody comprising the sequence of SEQ ID NO: 353. In some embodiments, the BCMA binding protein is a single domain antibody comprising the sequence of SEQ ID NO: 354. In some embodiments, the BCMA binding protein is a single domain antibody comprising the sequence of SEQ ID NO: 355. In some embodiments, the BCMA binding protein is a single domain antibody comprising the sequence of SEQ ID NO: 356. In some embodiments, the BCMA binding protein is a single domain antibody comprising the sequence of SEQ ID NO: 357. In some embodiments, the BCMA binding protein is a single domain antibody comprising the sequence of SEQ ID NO: 358. In some embodiments, the BCMA binding protein is a single domain antibody comprising the sequence of SEQ ID NO: 359.

[0138] In some embodiments, the BCMA binding protein is a single domain antibody comprising the sequence of SEQ ID NO: 360. In some embodiments, the BCMA binding protein is a single domain antibody comprising the sequence of SEQ ID NO: 361. In some embodiments, the BCMA binding protein is a single domain antibody comprising the sequence of SEQ ID NO: 362. In some embodiments, the BCMA binding protein is a single domain antibody comprising the sequence of SEQ ID NO: 363. In some embodiments, the BCMA binding protein is a single domain antibody comprising the sequence of SEQ ID NO: 364. In some embodiments, the BCMA binding protein is a single domain antibody comprising the sequence of SEQ ID NO: 365. In some embodiments, the BCMA binding protein is a single domain antibody comprising the sequence of SEQ ID NO: 366. In some embodiments, the BCMA binding protein is a single domain antibody comprising the sequence of SEQ ID NO: 367. In some embodiments, the BCMA binding protein is a single domain antibody comprising the sequence of SEQ ID NO: 368. In some embodiments, the BCMA binding protein is a single domain antibody comprising the sequence of SEQ ID NO: 369.

[0139] In some embodiments, the BCMA binding protein is a single domain antibody comprising the sequence of SEQ ID NO: 370. In some embodiments, the BCMA binding protein is a single domain antibody comprising the sequence of SEQ ID NO: 371. In some embodiments, the BCMA binding protein is a single domain antibody comprising the sequence of SEQ ID NO: 372. In some embodiments, the BCMA binding protein is a single domain antibody comprising the sequence of SEQ ID NO: 373. In some embodiments, the BCMA binding protein is a single domain antibody comprising the sequence of SEQ ID NO: 374. In some embodiments, the BCMA binding protein is a single domain antibody comprising the sequence of SEQ ID NO: 375. In some embodiments, the BCMA binding protein is a single domain antibody comprising the sequence of SEQ ID NO: 376. In some embodiments, the BCMA binding protein is a single domain antibody comprising the sequence of SEQ ID NO: 377. In some embodiments, the BCMA binding protein is a single domain antibody comprising the sequence of SEQ ID NO: 378. In some embodiments, the BCMA binding protein is a single domain antibody comprising the sequence of SEQ ID NO: 379.

[0140] In some embodiments, the BCMA binding protein is a single domain antibody comprising the sequence of SEQ ID NO: 380. In some embodiments, the BCMA binding protein is a single domain antibody comprising the sequence of SEQ ID NO: 381. In some embodiments, the BCMA binding protein is a single domain antibody comprising the sequence of SEQ ID NO: 382. In some embodiments, the BCMA binding protein is a single domain antibody comprising the sequence of SEQ ID NO: 383. In some embodiments, the BCMA binding protein is a single domain antibody comprising the sequence of SEQ ID NO: 384. In some embodiments, the BCMA binding protein is a single domain antibody comprising the sequence of SEQ ID NO: 385. In some embodiments, the BCMA binding protein is a single domain antibody comprising the sequence of SEQ ID NO: 386. In some embodiments, the BCMA binding protein is a single domain antibody comprising the sequence of SEQ ID NO: 387. In some embodiments, the BCMA binding protein is a single domain antibody comprising the sequence of SEQ ID NO: 388. In some embodiments, the BCMA binding protein is a single domain antibody comprising the sequence of SEQ ID NO: 389.

[0141] In some embodiments, the BCMA binding protein is a single domain antibody comprising the sequence of SEQ ID NO: 390. In some embodiments, the BCMA binding protein is a single domain antibody comprising the sequence of SEQ ID NO: 391. In some embodiments, the BCMA binding protein is a single domain antibody comprising the sequence of SEQ ID NO: 392. In some embodiments, the BCMA binding protein is a single domain antibody comprising the sequence of SEQ ID NO: 393. In some embodiments, the BCMA binding protein is a single domain antibody comprising the sequence of SEQ ID NO: 394. In some embodiments, the BCMA binding protein is a single domain antibody comprising the sequence of SEQ ID NO: 395. In some embodiments, the BCMA binding protein is a single domain antibody comprising the sequence of SEQ ID NO: 396. In some embodiments, the BCMA binding protein is a single domain antibody comprising the sequence of SEQ ID NO: 397. In some embodiments, the BCMA binding protein is a single domain antibody comprising the sequence of SEQ ID NO: 398. In some embodiments, the BCMA binding protein is a single domain antibody comprising the sequence of SEQ ID NO: 399.

[0142] In some embodiments, the BCMA binding protein is a single domain antibody comprising the sequence of SEQ ID NO: 400. In some embodiments, the BCMA binding protein is a single domain antibody comprising the sequence of SEQ ID NO: 401. In some embodiments, the BCMA binding protein is a single domain antibody comprising the sequence of SEQ ID NO: 402. In some embodiments, the BCMA binding protein is a single domain antibody comprising the sequence of SEQ ID NO: 403. In some embodiments, the BCMA binding protein is a single domain antibody comprising the sequence of SEQ ID NO: 404. In some embodiments, the BCMA binding protein is a single domain antibody comprising the sequence of SEQ ID NO: 405. In some embodiments, the BCMA binding protein is a single domain antibody comprising the sequence of SEQ ID NO: 406. In some embodiments, the BCMA binding protein is a single domain antibody comprising the sequence of SEQ ID NO: 407. In some embodiments, the BCMA binding protein is a single domain antibody comprising the sequence of SEQ ID NO: 408. In some embodiments, the BCMA binding protein is a single domain antibody comprising the sequence of SEQ ID NO: 409.

[0143] In some embodiments, the BCMA binding protein is a single domain antibody comprising the sequence of SEQ ID NO: 410. In some embodiments, the BCMA binding protein is a single domain antibody comprising the sequence of SEQ ID NO: 411. In some embodiments, the BCMA binding protein is a single domain antibody comprising the sequence of SEQ ID NO: 412. In some embodiments, the BCMA binding protein is a single domain antibody comprising the sequence of SEQ ID NO: 413. In some embodiments, the BCMA binding protein is a single domain antibody comprising the sequence of SEQ ID NO: 414. In some embodiments, the BCMA binding protein is a single domain antibody comprising the sequence of SEQ ID NO: 415. In some embodiments, the BCMA binding protein is a single domain antibody comprising the sequence of SEQ ID NO: 416. In some embodiments, the BCMA binding protein is a single domain antibody comprising the sequence of SEQ ID NO: 417. In some embodiments, the BCMA binding protein is a single domain antibody comprising the sequence of SEQ ID NO: 418. In some embodiments, the BCMA binding protein is a single domain antibody comprising the sequence of SEQ ID NO: 419.

[0144] In some embodiments, the BCMA binding protein is a single domain antibody comprising the sequence of SEQ ID NO: 420. In some embodiments, the BCMA binding protein is a single domain antibody comprising the sequence of SEQ ID NO: 421. In some embodiments, the BCMA binding protein is a single domain antibody comprising the sequence of SEQ ID NO: 422. In some embodiments, the BCMA binding protein is a single domain antibody comprising the sequence of SEQ ID NO: 423. In some embodiments, the BCMA binding protein is a single domain antibody comprising the sequence of SEQ ID NO: 424. In some embodiments, the BCMA binding protein is a single domain antibody comprising the sequence of SEQ ID NO: 425. In some embodiments, the BCMA binding protein is a single domain antibody comprising the sequence of SEQ ID NO: 426. In some embodiments, the BCMA binding protein is a single domain antibody comprising the sequence of SEQ ID NO: 427. In some embodiments, the BCMA binding protein is a single domain antibody comprising the sequence of SEQ ID NO: 428. In some embodiments, the BCMA binding protein is a single domain antibody comprising the sequence of SEQ ID NO: 429.

[0145] In some embodiments, the BCMA binding protein is a single domain antibody comprising the sequence of SEQ ID NO: 430. In some embodiments, the BCMA binding protein is a single domain antibody comprising the sequence of SEQ ID NO: 431. In some embodiments, the BCMA binding protein is a single domain antibody comprising the sequence of SEQ ID NO: 432. In some embodiments, the BCMA binding protein is a single domain antibody comprising the sequence of SEQ ID NO: 433. In some embodiments, the BCMA binding protein is a single domain antibody comprising the sequence of SEQ ID NO: 434. In some embodiments, the BCMA binding protein is a single domain antibody comprising the sequence of SEQ ID NO: 435. In some embodiments, the BCMA binding protein is a single domain antibody comprising the sequence of SEQ ID NO: 436. In some embodiments, the BCMA binding protein is a single domain antibody comprising the sequence of SEQ ID NO: 437. In some embodiments, the BCMA binding protein is a single domain antibody comprising the sequence of SEQ ID NO: 438. In some embodiments, the BCMA binding protein is a single domain antibody comprising the sequence of SEQ ID NO: 439.

[0146] In some embodiments, the BCMA binding protein is a single domain antibody comprising the sequence of SEQ ID NO: 440. In some embodiments, the BCMA binding protein is a single domain antibody comprising the sequence of SEQ ID NO: 441. In some embodiments, the BCMA binding protein is a single domain antibody comprising the sequence of SEQ ID NO: 442. In some embodiments, the BCMA binding protein is a single domain antibody comprising the sequence of SEQ ID NO: 443. In some embodiments, the BCMA binding protein is a single domain antibody comprising the sequence of SEQ ID NO: 444. In some embodiments, the BCMA binding protein is a single domain antibody comprising the sequence of SEQ ID NO: 445. In some embodiments, the BCMA binding protein is a single domain antibody comprising the sequence of SEQ ID NO: 446. In some embodiments, the BCMA binding protein is a single domain antibody comprising the sequence of SEQ ID NO: 447. In some embodiments, the BCMA binding protein is a single domain antibody comprising the sequence of SEQ ID NO: 448. In some embodiments, the BCMA binding protein is a single domain antibody comprising the sequence of SEQ ID NO: 449.

[0147] In some embodiments, the BCMA binding protein is a single domain antibody comprising the sequence of SEQ ID NO: 450. In some embodiments, the BCMA binding protein is a single domain antibody comprising the sequence of SEQ ID NO: 451. In some embodiments, the BCMA binding protein is a single domain antibody comprising the sequence of SEQ ID NO: 452. In some embodiments, the BCMA binding protein is a single domain antibody comprising the sequence of SEQ ID NO: 453. In some embodiments, the BCMA binding protein is a single domain antibody comprising the sequence of SEQ ID NO: 454. In some embodiments, the BCMA binding protein is a single domain antibody comprising the sequence of SEQ ID NO: 455. In some embodiments, the BCMA binding protein is a single domain antibody comprising the sequence of SEQ ID NO: 456. In some embodiments, the BCMA binding protein is a single domain antibody comprising the sequence of SEQ ID NO: 457. In some embodiments, the BCMA binding protein is a single domain antibody comprising the sequence of SEQ ID NO: 458. In some embodiments, the BCMA binding protein is a single domain antibody comprising the sequence of SEQ ID NO: 459. In some embodiments, the BCMA binding protein is a single domain antibody comprising the sequence of SEQ ID NO: 460.

[0148] A BCMA binding protein described herein can bind to human BCMA with a hKd ranges from about 0.1 nM to about 500 nM. In some embodiments, the hKd ranges from about 0.1 nM to about 450 nM. In some embodiments, the hKd ranges from about 0.1 nM to about 400 nM. In some embodiments, the hKd ranges from about 0.1 nM to about 350 nM. In some embodiments, the hKd ranges from about 0.1 nM to about 300 nM. In some embodiments, the hKd ranges from about 0.1 nM to about 250 nM. In some embodiments, the hKd ranges from about 0.1 nM to about 200 nM. In some embodiments, the hKd ranges from about 0.1 nM to about 150 nM. In some embodiments, the hKd ranges from about 0.1 nM to about 100 nM. In some embodiments, the hKd ranges from about 0.1 nM to about 90 nM. In some embodiments, the hKd ranges from about 0.2 nM to about 80 nM. In some embodiments, the hKd ranges from about 0.3 nM to about 70 nM. In some embodiments, the hKd ranges from about 0.4 nM to about 50 nM. In some embodiments, the hKd ranges from about 0.5 nM to about 30 nM. In some embodiments, the hKd ranges from about 0.6 nM to about 10 nM. In some embodiments, the hKd ranges from about 0.7 nM to about 8 nM. In some embodiments, the hKd ranges from about 0.8 nM to about 6 nM. In some embodiments, the hKd ranges from about 0.9 nM to about 4 nM. In some embodiments, the hKd ranges from about 1 nM to about 2 nM.

[0149] In some embodiments, any of the foregoing BCMA binding domains are affinity peptide tagged for ease of purification. In some embodiments, the affinity peptide tag is six consecutive histidine residues, also referred to as a His tag or 6X-his (His-His-His-His-His-His; SEQ ID NO: 3503).

[0150] In certain embodiments, the BCMA binding domains of the present disclosure preferentially bind membrane bound BCMA over soluble BCMA. Membrane bound BCMA refers to the presence of BCMA in or on the cell membrane surface of a cell that expresses BCMA. Soluble BCMA refers to BCMA that is no longer on in or on the cell membrane surface of a cell that expresses or expressed BCMA. In certain instances, the soluble BCMA is present in the blood and/or lymphatic circulation in a subject. In one embodiment, the BCMA binding domains bind membrane-bound BCMA at least 5 fold, 10 fold, 15 fold, 20 fold, 25 fold, 30 fold, 40 fold, 50 fold, 100 fold, 500 fold, or 1000 fold greater than soluble BCMA. In one embodiment, the BCMA targeting immune cell engaging proteins of the present disclosure preferentially bind membrane-bound BCMA 30 fold greater than soluble BCMA. Determining the preferential binding of an antigen binding protein to membrane bound BCMA over soluble BCMA can be readily determined using assays well known in the art.

### Delta-Like Ligand 3 (DLL3) Binding Proteins

[0151] DLL3 (also known as Delta-like Ligand 3 or SCDO1) is a member of the Delta-like family of Notch DSL ligands. Representative DLL3 protein orthologs include, but are not limited to, human (Accession Nos. NP_058637 and NP_982353), chimpanzee (Accession No. XP_003316395), mouse (Accession No. NP_031892), and rat (Accession No. NP_446118). In humans, the DLL3 gene consists of 8 exons spanning 9.5 kbp located on chromosome 19q13. Alternate splicing within the last exon gives rise to two processed transcripts, one of 2389 bases (Accession No. NM_016941) and one of 2052 bases (Accession No. NM_203486). The former transcript encodes a 618 amino acid protein (Accession No. NP_058637), whereas the latter encodes a 587 amino acid protein (Accession No. NP_982353). These two protein isoforms of DLL3 share overall 100% identity across their extracellular domains and their transmembrane domains, differing only in that the longer isoform contains an extended cytoplasmic tail containing 32 additional residues at the carboxy terminus of the protein. The extracellular region of the DLL3 protein, comprises six EGF-like domains, the single DSL domain and the N-terminal domain. Generally, the EGF domains are recognized as occurring at about amino acid residues 216-249 (domain 1), 274-310 (domain 2), 312-351 (domain 3), 353-389 (domain 4), 391-427 (domain 5) and 429-465 (domain 6), with the DSL domain at about amino acid residues 176-215 and the N-terminal domain at about amino acid residues 27-175 of hDLL3. Each of the EGF-like domains, the DSL domain and the N-terminal domain comprise part of the DLL3 protein as defined by a distinct amino acid sequence. The EGF-like domains are termed, in some embodiments, as EGF1 to EGF6 with EGF1 being closest to the N-terminal portion of the protein. In general, DSL ligands are composed of a series of structural domains: a unique N-terminal domain, followed by a conserved DSL domain, multiple tandem epidermal growth factor (EGF)-like repeats, a transmembrane domain, and a cytoplasmic domain not highly conserved across ligands but one which contains multiple lysine residues that are potential sites for ubiquitination by unique E3 ubiquitin ligases. The DSL domain is a degenerate EGF-domain that is necessary but not sufficient for interactions with Notch receptors. Additionally, the first two EGF-like repeats of most DSL ligands contain a smaller protein sequence motif known as a DOS domain that co-operatively interacts with the DSL domain when activating Notch signaling.

[0152] In some embodiments, the disclosed DLL3 immune cell engaging proteins of this disclosure are generated, fabricated, engineered or selected so as to react with a selected domain, motif or epitope within a DLL3 protein. In some embodiments, the DLL3 targeting immune cell engaging protein binds to the DSL domain and, in some embodiments, binds to an epitope comprising G203, R205, P206 within the DSL domain.

[0153] The DLL3 binding domain of the DLL3 targeting immune cell engaging proteins of the present disclosure are, in some embodiments, engineered fabricated and/or selected to react with both isoform(s) of DLL3 or a single isoform of the protein or, conversely, comprise a pan-DLL binding domain that reacts or associates with at least one additional DLL family member in addition to DLL3. In some embodiments, the DLL3 binding domain, such as DLL3 binding domain are engineered, fabricated, and/or selected so that they react with domains (or epitopes therein) that are exhibited by DLL3 only or with domains that are at least somewhat conserved across multiple or all DLL family members.

[0154] In some embodiments the DLL3 binding domain associates or binds to a specific epitope, portion, motif or domain of DLL3. Both DLL3 isoforms incorporate an identical extracellular region comprising at least an N-terminal domain, a DSL (Delta/Serrate/lag-2) domain and six EGF-like domains (i.e., EGF1-EGF6). Accordingly, in certain embodiments the DLL3 binding domain binds or associate with the N-terminal domain of DLL3 (amino acids 27-175 in the mature protein) while in other embodiments the DLL3 binding domain associates with the DSL domain (amino acids 176-215) or epitope therein. In other aspects of the present disclosure the DLL3 binding domain associates or bind to a specific epitope located in a particular EGF-like domain of DLL3. In some embodiments, the DLL3 binding domain associates or binds to an epitope located in EGF1 (amino acids 216-249), EGF2 (amino acids 274-310), EGF3 (amino acids 312-351), EGF4 (amino acids 353-389), EGF5 (amino acids 391.427) or EGF6 (amino acids 429-465). In some embodiments, each of the aforementioned domains comprises more than one epitope and/or more than one bin. In some embodiments the DLL3 binding domain binds, reacts or associates with the DSL domain or an epitope therein. In other embodiments the DLL3 binding domain binds, reacts or associates with a particular EGF-like domain or an epitope therein. In some embodiments the DLL3 binding domain binds, reacts or associates with the N-terminal domain or an epitope therein.

[0155] In some embodiments, the DLL3 binding proteins of this disclosure, such as the DLL3 binding domain of the immune cell engaging proteins of this disclosure binds to the full length DLL3 protein or to a fragment thereof, such as epitope containing fragments within the full length DLL3 protein, as described above. In some cases, the epitope containing fragment comprises antigenic or immunogenic fragments and derivatives thereof of the DLL3 protein. Epitope containing fragments, including antigenic or immunogenic fragments, are, in some embodiments, 12 amino acids or more, 20 amino acids or more, 50 or 100 amino acids or more. The DLL3 fragments, in some embodiments, comprises 95% or more of the length of the full protein, 90% or more, 75% or 50% or 25% or 10% or more of the length of the full protein. In some embodiments, the epitope-containing fragments of DLL3 including antigenic or immunogenic fragments are capable of eliciting a relevant immune response in a patient. Derivatives of DLL3 include, in some embodiments, variants on the sequence in which one or more (e.g., 1-20 such as 15 amino acids, or up to 20% such as up to 10% or 5% or 1% by number of amino acids based on the total length of the protein) deletions, insertions or substitutions have been made to the DLL3 sequence provided in SEQ ID NO: 3216 (UniProtKB Accession Q9NYJ7). In some embodiments, substitutions comprise conservative substitutions. Derivatives and variants of DLL3, in some examples, have essentially the same biological function as the DLL3 protein from which they are derived. For instance, derivatives and variants of DLL3 are, in some cases, comparably antigenic or immunogenic to the protein from which they are derived, have either the ligand-binding activity, or the active receptor-complex forming ability, or preferably both, of the protein from which they are derived, and have the same tissue distribution as DLL3.

[0156] The design of the DLL3 targeting immune cell engaging proteins described herein allows the binding domain to DLL3 to be flexible in that the binding domain to DLL3 can be any type of binding domain, including but not limited to, domains from a monoclonal antibody, a polyclonal antibody, a recombinant antibody, a human antibody, a humanized antibody. In some embodiments, the binding domain to DLL3 is a single chain variable fragments (scFv), a single-domain antibody such as a heavy chain variable domain (VH), a light chain variable domain (VL) and a variable domain (VHH) of camelid derived single domain antibody. In other embodiments, the binding domain to DLL3 is a non-Ig binding domain, i.e., an antibody mimetic, such as anticalins, affilins, affibody molecules, affimers, affitins, alphabodies, avimers, DARPins, fynomers, kunitz domain peptides, and monobodies. In further embodiments, the binding domain to DLL3 is a ligand or peptide that binds to or associates with DLL3. In yet further embodiments, the binding domain to DLL3 is a knottin. In yet further embodiments, the binding domain to DLL3 is a small molecular entity.

[0157] In some embodiments, the DLL3 binding domain binds to a protein comprising the sequence of SEQ ID NO: 3216 (UniProtKB Accession Q9NYJ7). In some embodiments, the DLL3 binding domain binds to a protein comprising a truncated sequence compared to SEQ ID NO: 3216 (UniProtKB Accession Q9NYJ7). In some embodiments, the DLL3 binding domain binds to a protein comprising the sequence of SEQ ID NO: 3509 or SEQ ID NO: 3217 (which is the mature extracellular domain of a DLL3 protein). In some embodiments, the DLL3 binding domain binds to a protein comprising amino acids 47-492 of SEQ ID NO: 3509. In some embodiments, the DLL3 binding domain recognizes an epitope within amino acids 47-4492 of SEQ ID NO: 3509.

[0158] In some embodiments, the DLL3 binding domain is an anti-DLL3 antibody or an antibody variant. As used herein, the term “antibody variant” refers to variants and derivatives of an antibody described herein. In certain embodiments, amino acid sequence variants of the anti-DLL3 antibodies described herein are contemplated. For example, in certain embodiments amino acid sequence variants of anti-DLL3 antibodies described herein are contemplated to improve the binding affinity and/or other biological properties of the antibodies. Exemplary method for preparing amino acid variants include, but are not limited to, introducing appropriate modifications into the nucleotide sequence encoding the antibody, or by peptide synthesis. Such modifications include, for example, deletions from, and/or insertions into and/or substitutions of residues within the amino acid sequences of the antibody.

[0159] Any combination of deletion, insertion, and substitution can be made to arrive at the final construct, provided that the final construct possesses the desired characteristics, antigen-binding. In certain embodiments, antibody variants having one or more amino acid substitutions are provided. Sites of interest for substitution mutagenesis include the CDRs and framework regions. Examples of such substitutions are described below. Amino acid substitutions may be introduced into an antibody of interest and the products screened for a desired activity, retained/improved antigen binding, decreased immunogenicity, or improved T-cell mediated cytotoxicity (TDCC). Both conservative and non-conservative amino acid substitutions are contemplated for preparing the antibody variants.

[0160] In another example of a substitution to create a variant anti-DLL3 antibody, one or more hypervariable region residues of a parent antibody are substituted. In general, variants are then selected based on improvements in desired properties compared to a parent antibody, for example, increased affinity, reduced affinity, reduced immunogenicity, increased pH dependence of binding.

[0161] In some embodiments, the DLL3 binding domain of the DLL3 targeting immune cell engaging protein is a single domain antibody such as a heavy chain variable domain (VH), a variable domain (VHH) of a llama derived sdAb, a peptide, a ligand or a small molecule entity specific for DLL3. In some embodiments, the DLL3 binding domain of the DLL3 targeting immune cell engaging protein described herein is any domain that binds to DLL3 including but not limited to domains from a monoclonal antibody, a polyclonal antibody, a recombinant antibody, a human antibody, a humanized antibody. In certain embodiments, the DLL3 binding domain is a single-domain antibody. In other embodiments, the DLL3 binding domain is a peptide. In further embodiments, the DLL3 binding domain is a small molecule.

[0162] In one embodiment, a single domain antibody corresponds to the VHH domains of naturally occurring heavy chain antibodies directed against DLL3. As further described herein, such VHH sequences can generally be generated or obtained by suitably immunizing a species of Llama with DLL3, (i.e., so as to raise an immune response and/or heavy chain antibodies directed against DLL3), by obtaining a suitable biological sample from said Llama (such as a blood sample, serum sample or sample of B-cells), and by generating VHH sequences directed against DLL3, starting from said sample, using any suitable technique known in the field.

[0163] In another embodiment, such naturally occurring VHH domains against DLL3, are obtained from naïve libraries of Camelid VHH sequences, for example by screening such a library using DLL3, or at least one part, fragment, antigenic determinant or epitope thereof using one or more screening techniques known in the field. Such libraries and techniques are for example described in WO 99/37681, WO 01/90190, WO 03/025020 and WO 03/035694. Alternatively, improved synthetic or semi-synthetic libraries derived from naïve VHH libraries are used, such as VHH libraries obtained from naïve VHH libraries by techniques such as random mutagenesis and/or CDR shuffling, as for example described in WO 00/43507.

[0164] In a further embodiment, yet another technique for obtaining VHH sequences directed against DLL3, involves suitably immunizing a transgenic mammal that is capable of expressing heavy chain antibodies (i.e., so as to raise an immune response and/or heavy chain antibodies directed against DLL3), obtaining a suitable biological sample from said transgenic mammal (such as a blood sample, serum sample or sample of B-cells), and then generating VHH sequences directed against DLL3, starting from said sample, using any suitable technique known in the field. For example, for this purpose, the heavy chain antibody-expressing rats or mice and the further methods and techniques described in WO 02/085945 and in WO 04/049794 can be used.

[0165] In some embodiments, an anti-DLL3 single domain antibody of the DLL3 targeting immune cell engaging protein comprises a single domain antibody with an amino acid sequence that corresponds to the amino acid sequence of a naturally occurring VHH domain, but that has been “humanized”, i.e., by replacing one or more amino acid residues in the amino acid sequence of said naturally occurring VHH sequence (and in particular in the framework sequences) by one or more of the amino acid residues that occur at the corresponding position(s) in a VH domain from a conventional 4-chain antibody from a human being (e.g., as indicated above).

[0166] Other suitable methods and techniques for obtaining the anti-DLL3 single domain antibody of the disclosure and/or nucleic acids encoding the same, starting from naturally occurring VH sequences or VHH sequences for example comprises combining one or more parts of one or more naturally occurring VH sequences (such as one or more framework (FR) sequences and/or complementarity determining region (CDR) sequences), one or more parts of one or more naturally occurring VHH sequences (such as one or more FR sequences or CDR sequences), and/or one or more synthetic or semi-synthetic sequences, in a suitable manner, so as to provide an anti-DLL3 single domain antibody of the disclosure or a nucleotide sequence or nucleic acid encoding the same.

[0167] In some embodiments, the DLL3 binding domain is an anti-DLL3 specific antibody comprising a heavy chain variable complementarity determining region CDR1, a heavy chain variable CDR2, a heavy chain variable CDR3, a light chain variable CDR1, a light chain variable CDR2, and a light chain variable CDR3. In some embodiments, the DLL3 binding domain comprises any domain that binds to DLL3 including but not limited to domains from a monoclonal antibody, a polyclonal antibody, a recombinant antibody, a human antibody, a humanized antibody, or antigen binding fragments such as single domain antibodies (sdAb), Fab, Fab′, F(ab)2, and Fv fragments, fragments comprised of one or more CDRs, single-chain antibodies (e.g., single chain Fv fragments (scFv)), disulfide stabilized (dsFv) Fv fragments, heteroconjugate antibodies (e.g., bispecific antibodies), pFv fragments, heavy chain monomers or dimers, light chain monomers or dimers, and dimers consisting of one heavy chain and one light chain. In some embodiments, the DLL3 binding domain is a single domain antibody. In some embodiments, the anti-DLL3 single domain antibody comprises heavy chain variable complementarity determining regions (CDR), CDR1, CDR2, and CDR3.

[0168] In some embodiments, the DLL3 binding domain is a polypeptide comprising an amino acid sequence that is comprised of four framework regions/sequences (f1-f4) interrupted by three complementarity determining regions/sequences, as represented by the formula: f1-r1-f2-r2-f3-r3-f4, wherein r1, r2, and r3 are complementarity determining regions CDR1, CDR2, and CDR3, respectively, and f1, f2, f3, and f4 are framework residues. The framework residues of the DLL3 binding protein of the present disclosure comprise, for example, 75, 76, 77, 78, 79, 80, 81, 82, 83, 84, 85, 86, 87, 88, 89, 90, 91, 92, 93, or 94 amino acid residues, and the complementarity determining regions comprise, for example, 24, 25, 26, 27, 28, 29, 30, 31, 32, 33, 34, 35, or 36 amino acid residues. In some embodiments, the DLL3 binding domain comprises an amino acid sequence selected from the group consisting of SEQ ID NOS: 1308-1750. In some embodiments, CDR1 of the DLL3 binding domain comprises a sequence selected from the group consisting of SEQ ID NOS: 1751-2193, or one or more amino acid substitutions relative to a sequence selected from the group consisting of SEQ ID NOS: 1751-2193. In some embodiments, CDR2 comprises a sequence selected from the group consisting of SEQ ID NOS: 2194-2636, or one or more amino acid substitutions relative to a sequence selected from the group consisting of SEQ ID NOS: 2194-2636. In some embodiments, the CDR3 comprises a sequence selected from the group consisting of SEQ ID NOS: 2637-3080, or one or more substitutions relative to a sequence selected from the group consisting of SEQ ID NOS: 2637-3080.

[0169] In some embodiments, the CDR1 comprises an amino acid sequence selected from the group consisting of SEQ ID NOS: 1751-2193 or a variant having one, two, three, four, five, six, seven, eight, nine, or ten amino acid substitutions in an amino acid selected from the group consisting of SEQ ID NOS: 1751-2193. In some embodiments, the CDR2 comprises an amino acid sequence selected from the group consisting of SEQ ID NOS: 2194-2636 or a variant having one, two, three, four, five, six, seven, eight, nine, or ten amino acid substitutions in an amino acid sequence selected from the group consisting of SEQ ID NOS: 2194-2636. In some embodiments, the CDR3 comprises an amino acid sequence selected from the group consisting of SEQ ID NOS: 2637-3080 or a variant having one, two, three, four, five, six, seven, eight, nine, or ten amino acid substitutions in a sequence selected from the group consisting of SEQ ID NOS: 2637-3080.

[0170] In some embodiments, the CDR1 comprises an amino acid sequence selected from the group consisting of SEQ ID NOS: 1803-1836 or a variant having one, two, three, four, five, six, seven, eight, nine, or ten amino acid substitutions in an amino acid selected from the group consisting of SEQ ID NOS: 1803-1836. In some embodiments, the CDR2 comprises an amino acid sequence selected from the group consisting of SEQ ID NOS: 2246-2279 or a variant having one, two, three, four, five, six, seven, eight, nine, or ten amino acid substitutions in an amino acid sequence selected from the group consisting of SEQ ID NOS: 2246-2279. In some embodiments, the CDR3 comprises an amino acid sequence selected from the group consisting of SEQ ID NOS: 2689-2722 or a variant having one, two, three, four, five, six, seven, eight, nine, or ten amino acid substitutions in a sequence selected from the group consisting of SEQ ID NOS: 2689-2722.

[0171] In some embodiments, the CDR1 comprises an amino acid sequence selected from the group consisting of SEQ ID NOS: 1837-2117 or a variant having one, two, three, four, five, six, seven, eight, nine, or ten amino acid substitutions in an amino acid selected from the group consisting of SEQ ID NOS: 1837-2117. In some embodiments, the CDR2 comprises an amino acid sequence selected from the group consisting of SEQ ID NOS: 2280-2560 or a variant having one, two, three, four, five, six, seven, eight, nine, or ten amino acid substitutions in an amino acid sequence selected from the group consisting of SEQ ID NOS: 2280-2560. In some embodiments, the CDR3 comprises an amino acid sequence selected from the group consisting of SEQ ID NOS: 2723-3003 or a variant having one, two, three, four, five, six, seven, eight, nine, or ten amino acid substitutions in a sequence selected from the group consisting of SEQ ID NOS: 2723-3003.

[0172] In some embodiments, the CDR1 comprises an amino acid sequence selected from the group consisting of SEQ ID NOS: 2118-2193 or a variant having one, two, three, four, five, six, seven, eight, nine, or ten amino acid substitutions in an amino acid selected from the group consisting of SEQ ID NOS: 2118-2193. In some embodiments, the CDR2 comprises an amino acid sequence selected from the group consisting of SEQ ID NOS: 2561-2636 or a variant having one, two, three, four, five, six, seven, eight, nine, or ten amino acid substitutions in an amino acid sequence selected from the group consisting of SEQ ID NOS: 2561-2636. In some embodiments, the CDR3 comprises an amino acid sequence selected from the group consisting of SEQ ID NOS: 3004-3080 or a variant having one, two, three, four, five, six, seven, eight, nine, or ten amino acid substitutions in a sequence selected from the group consisting of SEQ ID NOS: 3004-3080.

[0173] In various embodiments, the DLL3 binding domain of the present disclosure is at least about 75%, about 76%, about 77%, about 78%, about 79%, about 80%, about 81%, about 82%, about 83%, about 84%, about 85%, about 86%, about 87%, about 88%, about 89%, about 90%, about 91%, about 92%, about 93%, about 94%, about 95%, about 96%, about 97%, about 98%, about 99%, or about 100% identical to an amino acid sequence selected from the group consisting of SEQ ID NOS: 1308-1750. In various embodiments, the DLL3 binding domain of the present disclosure is at least about 75%, about 76%, about 77%, about 78%, about 79%, about 80%, about 81%, about 82%, about 83%, about 84%, about 85%, about 86%, about 87%, about 88%, about 89%, about 90%, about 91%, about 92%, about 93%, about 94%, about 95%, about 96%, about 97%, about 98%, about 99%, or about 100% identical to an amino acid sequence selected from the group consisting of SEQ ID NOS: 1360-1393.

[0174] In various embodiments, the DLL3 binding domain of the present disclosure is at least about 75%, about 76%, about 77%, about 78%, about 79%, about 80%, about 81%, about 82%, about 83%, about 84%, about 85%, about 86%, about 87%, about 88%, about 89%, about 90%, about 91%, about 92%, about 93%, about 94%, about 95%, about 96%, about 97%, about 98%, about 99%, or about 100% identical to an amino acid sequence selected from the group consisting of SEQ ID NOS: 1394-1674.

[0175] In various embodiments, the DLL3 binding domain of the present disclosure is at least about 75%, about 76%, about 77%, about 78%, about 79%, about 80%, about 81%, about 82%, about 83%, about 84%, about 85%, about 86%, about 87%, about 88%, about 89%, about 90%, about 91%, about 92%, about 93%, about 94%, about 95%, about 96%, about 97%, about 98%, about 99%, or about 100% identical to SEQ ID NO:1375, or a sequence derived from SEQ ID NO:1375.

[0176] In various embodiments, the DLL3 binding domain of the present disclosure is at least about 75%, about 76%, about 77%, about 78%, about 79%, about 80%, about 81%, about 82%, about 83%, about 84%, about 85%, about 86%, about 87%, about 88%, about 89%, about 90%, about 91%, about 92%, about 93%, about 94%, about 95%, about 96%, about 97%, about 98%, about 99%, or about 100% identical to SEQ ID NO:1382, or a sequence derived from SEQ ID NO:1382.

[0177] In some embodiments, the DLL3 binding domain of the DLL3 targeting immune cell engaging protein is cross-reactive with human and cynomolgus DLL3. In some embodiments, the DLL3 binding domain is specific for human DLL3. In certain embodiments, the DLL3 binding domain disclosed herein binds to human DLL3 with a human Kd (hKd). In certain embodiments, the DLL3 binding domain disclosed herein binds to cynomolgus DLL3 with a cynomolgus Kd (cKd). In certain embodiments, the DLL3 binding domain disclosed herein binds to both cynomolgus DLL3 and a human DLL3, with a cyno Kd (cKd) and a human Kd, respectively (hKd). In some embodiments, the DLL3 binding protein binds to human and cynomolgus DLL3 with comparable binding affinities (i.e., hKd and cKd values do not differ by more than ±10%). In some embodiments, the hKd and the cKd range from about 0.001 nM to about 500 nM. In some embodiments, the hKd and the cKd range from about 0.001 nM to about 450 nM. In some embodiments, the hKd and the cKd range from about 0.001 nM to about 400 nM. In some embodiments, the hKd and the cKd range from about 0.001 nM to about 350 nM. In some embodiments, the hKd and the cKd range from about 0.001 nM to about 300 nM. In some embodiments, the hKd and the cKd range from about 0.001 nM to about 250 nM. In some embodiments, the hKd and the cKd range from about 0.001 nM to about 200 nM. In some embodiments, the hKd and the cKd range from about 0.001 nM to about 150 nM. In some embodiments, the hKd and the cKd range from about 0.001 nM to about 100 nM. In some embodiments, the hKd and the cKd range from about 0.1 nM to about 90 nM. In some embodiments, the hKd and the cKd range from about 0.2 nM to about 80 nM. In some embodiments, the hKd and the cKd range from about 0.3 nM to about 70 nM. In some embodiments, the hKd and the cKd range from about 0.4 nM to about 50 nM. In some embodiments, the hKd and the cKd range from about 0.5 nM to about 30 nM. In some embodiments, the hKd and the cKd range from about 0.6 nM to about 10 nM. In some embodiments, the hKd and the cKd range from about 0.7 nM to about 8 nM. In some embodiments, the hKd and the cKd range from about 0.8 nM to about 6 nM. In some embodiments, the hKd and the cKd range from about 0.9 nM to about 4 nM. In some embodiments, the hKd and the cKd range from about 1 nM to about 2 nM.

[0178] In certain embodiments, the DLL3 binding domains of the present disclosure preferentially bind membrane bound DLL3 over soluble DLL3. Membrane bound DLL3 refers to the presence of DLL3 in or on the cell membrane surface of a cell that expresses DLL3. Soluble DLL3 refers to DLL3 that is no longer on in or on the cell membrane surface of a cell that expresses or expressed DLL3. In certain instances, the soluble DLL3 is present in the blood and/or lymphatic circulation in a subject. In one embodiment, the DLL3 binding proteins bind membrane-bound DLL3 at least 5 fold, 10 fold, 15 fold, 20 fold, 25 fold, 30 fold, 40 fold, 50 fold, 100 fold, 500 fold, or 1000 fold greater than soluble DLL3. In one embodiment, the antigen binding proteins of the present disclosure preferentially bind membrane-bound DLL3 30 fold greater than soluble DLL3. Determining the preferential binding of an antigen binding protein to membrane bound DLL3 over soluble DLL3 can be readily determined using assays well known in the art.

[0179] In some embodiments, any of the foregoing DLL3 binding domains (e.g., anti-DLL3 single domain antibodies of SEQ ID NOS: 1308-1750) are affinity peptide tagged for ease of purification. In some embodiments, the affinity peptide tag is six consecutive histidine residues, also referred to as 6X-his (SEQ ID NO: 3503).

[0180] In some embodiments, any of the foregoing DLL3 binding domains (e.g., anti-DLL3 single domain antibodies of SEQ ID NOS: 1308-1750) are affinity peptide tagged for ease of purification. In some embodiments, the affinity peptide tag is six consecutive histidine residues, also referred to as 6X-his (SEQ ID NO: 3503).

### Epidermal Growth Factor Receptor (EGFR) Binding Proteins

[0181] Epidermal growth factor receptor (EGFR) has been causally implicated in human malignancy. Abnormal activity of the Her family of receptors is involved with breast cancer. EGFR, Her-3, and Her-4 are frequently expressed in ovarian granulosa cell tumors (Leibl, S. et al., Gynecol Oncol 101:18-23 (2005). In particular, increased expression of EGFR has been observed in breast, bladder, lung, head, neck and stomach cancer as well as glioblastomas.

[0182] Increased EGFR receptor expression may be associated with increased production of a EGFR ligand, transforming growth factor alpha (TGF-α), by the same tumor cells resulting in receptor activation by an autocrine stimulatory pathway.

[0183] Cetuximab (Erbitux™), an anti-EGFR antibody, has been associated with potentially life threatening infusion reactions (Thomas, M., Clin J Oncol Nurs. 9(3):332-8 (2005)). Gefitinib (Iressa™) and erlotinib (Tarceva™), both EGFR specific small molecule inhibitors, are associated with a risk of interstitial lung disease (Sandler A, Oncology 20(5 Suppl 2):35-40 (2006)). Individual patients may be predisposed to particular types of complications that affect the choice of drug treatment. There is a need for a greater choice of treatment options which allows physicians to select the therapeutic with the best side effect profile for an individual patient. The present disclosure provides novel polypeptides and protein therapeutics useful in methods of treatment, particularly for treatment of conditions associated with abnormal expression of EGFR.

[0184] Epidermal growth factor receptor (EGFR, also known as HER1 or ErbB1) is a member of the ErbB/HER family of type 1 receptor tyrosine kinases (RTKs). Other members of this family include ErbB2 (HER2 or Neu), ErbB3 (HER3) and ErbB4 (HER4). Known ligands for EGFR include epidermal growth factor (EGF) and transforming growth factor alpha (TGF-alpha). Ligand binding to EGFR is known to induce tyrosine phosphorylation and receptor dimerization with other ErbB family members.

[0185] RTKs such as EGFR function to allow cells to respond to diverse external stimuli. However, aberrant activation and/or overexpression of EGFR is associated with the development and progression of several human cancers. Accordingly, EGFR is a target for anti-cancer therapies. Approved drugs targeting EGFR include small molecule inhibitors such as gefitinib (Iressa®) and erlotinib (Tarceva®), and anti-EGFR antibodies such as cetuximab (Erbitux®) and panitumumab (Vectibix®). Anti-EGFR antibodies are mentioned in, e.g., U.S. Pat. Nos. 4,943,533, 5,844,093, 7,060,808, 7,247,301, 7,595,378, 7,723,484, and 7,939,072. There is still a need for having available further options for the treatment of diseases related to the overexpression of EGFR, including, but not limited to, renal cell carcinoma, pancreatic carcinoma, breast cancer, head and neck cancer, prostate cancer, malignant gliomas, osteosarcoma, colorectal cancer, gastric cancer (e.g., gastric cancer with MET amplification), malignant mesothelioma, multiple myeloma, ovarian cancer, small cell lung cancer, non-small cell lung cancer (e.g., EGFR-dependent non-small cell lung cancer), synovial sarcoma, thyroid cancer, or melanoma. The present disclosure provides, in certain embodiments, EGFR binding proteins, EGFR targeting immune cell engaging proteins containing EGFR binding domains which specifically bind to EGFR on the surface of tumor target cells.

[0186] The design of the EGFR targeting immune cell engaging proteins described herein allows the binding domain to EGFR to be flexible in that the binding domain to EGFR can be any type of binding domain, including but not limited to, domains from a monoclonal antibody, a polyclonal antibody, a recombinant antibody, a human antibody, a humanized antibody. In some embodiments, the binding domain to EGFR is a single chain variable fragments (scFv), single-domain antibody such as a heavy chain variable domain (VH), a light chain variable domain (VL) and a variable domain (VHH) of camelid derived single domain antibody. In other embodiments, the binding domain to EGFR is a non-Ig binding domain, i.e., antibody mimetic, such as anticalins, affilins, affibody molecules, affimers, affitins, alphabodies, avimers, DARPins, fynomers, kunitz domain peptides, and monobodies. In further embodiments, the binding domain to EGFR is a ligand or peptide that binds to or associates with EGFR. In yet further embodiments, the binding domain to EGFR is a knottin. In yet further embodiments, the binding domain to EGFR is a small molecular entity.

[0187] In some embodiments, the EGFR binding domain is an anti-EGFR antibody or an antibody variant. As used herein, the term “antibody variant” refers to variants and derivatives of an antibody described herein. In certain embodiments, amino acid sequence variants of the anti-EGFR antibodies described herein are contemplated. For example, in certain embodiments amino acid sequence variants of anti-EGFR antibodies described herein are contemplated to improve the binding affinity and/or other biological properties of the antibodies. Exemplary method for preparing amino acid variants include, but are not limited to, introducing appropriate modifications into the nucleotide sequence encoding the antibody, or by peptide synthesis. Such modifications include, for example, deletions from, and/or insertions into and/or substitutions of residues within the amino acid sequences of the antibody.

[0188] Any combination of deletion, insertion, and substitution can be made to arrive at the final construct, provided that the final construct possesses the desired characteristics, e.g., antigen-binding. In certain embodiments, antibody variants having one or more amino acid substitutions are provided. Sites of interest for substitution mutagenesis include the CDRs and framework regions. Examples of such substitutions are described below. Amino acid substitutions may be introduced into an antibody of interest and the products screened for a desired activity, e.g., retained/improved antigen binding, decreased immunogenicity, or improved T-cell mediated cytotoxicity (TDCC). Both conservative and non-conservative amino acid substitutions are contemplated for preparing the antibody variants.

[0189] In another example of a substitution to create a variant anti-EGFR antibody, one or more hypervariable region residues of a parent antibody are substituted. In general, variants are then selected based on improvements in desired properties compared to a parent antibody, for example, increased affinity, reduced affinity, reduced immunogenicity, increased pH dependence of binding.

[0190] In some embodiments, the EGFR binding domain of the EGFR targeting immune cell engaging protein is a single domain antibody such as a heavy chain variable domain (VH), a variable domain (VHH) of a llama derived sdAb, a peptide, a ligand or a small molecule entity specific for EGFR. In some embodiments, the EGFR binding domain of the EGFR targeting immune cell engaging protein described herein is any domain that binds to EGFR including but not limited to domains from a monoclonal antibody, a polyclonal antibody, a recombinant antibody, a human antibody, a humanized antibody. In certain embodiments, the EGFR binding domain is a single-domain antibody. In other embodiments, the EGFR binding domain is a peptide. In further embodiments, the EGFR binding domain is a small molecule.

[0191] In one embodiment, a single domain antibody corresponds to the VHH domains of naturally occurring heavy chain antibodies directed against EGFR. As further described herein, such VHH sequences can generally be generated or obtained by suitably immunizing a species of Llama with EGFR, (i.e., so as to raise an immune response and/or heavy chain antibodies directed against EGFR), by obtaining a suitable biological sample from said Llama (such as a blood sample, serum sample or sample of B-cells), and by generating VHH sequences directed against EGFR, starting from said sample, using any suitable technique known in the field.

[0192] In another embodiment, such naturally occurring VHH domains against EGFR, are obtained from naïve libraries of Camelid VHH sequences, for example by screening such a library using EGFR, or at least one part, fragment, antigenic determinant or epitope thereof using one or more screening techniques known in the field. Such libraries and techniques are for example described in WO 99/37681, WO 01/90190, WO 03/025020 and WO 03/035694. Alternatively, improved synthetic or semi-synthetic libraries derived from naïve VHH libraries are used, such as VHH libraries obtained from naïve VHH libraries by techniques such as random mutagenesis and/or CDR shuffling, as for example described in WO 00/43507.

[0193] In a further embodiment, yet another technique for obtaining VHH sequences directed against EGFR, involves suitably immunizing a transgenic mammal that is capable of expressing heavy chain antibodies (i.e., so as to raise an immune response and/or heavy chain antibodies directed against EGFR), obtaining a suitable biological sample from said transgenic mammal (such as a blood sample, serum sample or sample of B-cells), and then generating VHH sequences directed against EGFR, starting from said sample, using any suitable technique known in the field. For example, for this purpose, the heavy chain antibody-expressing rats or mice and the further methods and techniques described in WO 02/085945 and in WO 04/049794 can be used.

[0194] In some embodiments, the EGFR binding domain of this disclosure binds to a protein comprising the sequence of SEQ ID NO: 3205 (UniProt Accession No. Q504U8). In some embodiments, the EGFR binding domain binds to a protein comprising a truncated sequence compared to SEQ ID NO: 3205. In some embodiments, the EGFR binding domain binds to a protein comprising the sequence of SEQ ID NO: 3206 (UniProt Accession No. Q01279). In some embodiments, the EGFR binding domain binds to a protein comprising a truncated sequence compared to SEQ ID NO: 3206. In some embodiments, the EGFR binding domain binds to a protein comprising the sequence of SEQ ID NO: 3207 (UniProt Accession No. A0A2K5WK39). In some embodiments, the EGFR binding domain binds to a protein comprising a truncated sequence compared to SEQ ID NO: 3207.

[0195] In some embodiments, the EGFR binding domains disclosed herein recognize full-length EGFR. In certain instances, the EGFR binding domains disclosed herein recognize an epitope within EGFR, such as, in some cases the EGFR targeting immune cell engaging proteins interact with one or more amino acids found within the extracellular domain of human EGFR (e.g., within extracellular domain I, II, III, and/or IV). The epitope to which the antibodies bind may consist of a single contiguous sequence of 3 or more (e.g., 3, 4, 5, 6, 7, 8, 9, 10, 11, 12, 13, 14, 15, 16, 17, 18, 19, 20 or more) amino acids located within the extracellular domain of EGFR. Alternatively, the epitope may consist of a plurality of non-contiguous amino acids (or amino acid sequences) located within the extracellular domain of EGFR.

[0196] In some embodiments, the EGFR binding proteins of this disclosure binds to the full length EGFR protein or to a fragment thereof, such as epitope containing fragments within the full length EGFR protein, as described above. In some cases, the epitope containing fragment comprises antigenic or immunogenic fragments and derivatives thereof of the EGFR protein. Epitope containing fragments, including antigenic or immunogenic fragments, are, in some embodiments, 12 amino acids or more, e.g., 20 amino acids or more, 50 or 100 amino acids or more. The EGFR fragments, in some embodiments, comprises 95% or more of the length of the full protein, 90% or more, 75% or 50% or 25% or 10% or more of the length of the full protein. In some embodiments, the epitope-containing fragments of EGFR including antigenic or immunogenic fragments are capable of eliciting a relevant immune response in a patient. Derivatives of EGFR include, in some embodiments, variants on the sequence in which one or more (e.g., 1-20 such as 15 amino acids, or up to 20% such as up to 10% or 5% or 1% by number of amino acids based on the total length of the protein) deletions, insertions or substitutions have been made to the EGFR sequence provided in SEQ ID NO: 3205, 3206, or 3207.

[0197] In some embodiments, substitutions comprise conservative substitutions. Derivatives and variants of, in some examples, have essentially the same biological function as the protein from which they are derived. For instance, derivatives and variants of EGFR are, in some cases, comparably antigenic or immunogenic to the protein from which they are derived, have either the ligand-binding activity, or the active receptor-complex forming ability, or preferably both, of the protein from which they are derived, and have the same tissue distribution as EGFR.

[0198] In some embodiments, the EGFR binding protein specifically binds EGFR with equivalent or better affinity as that of a reference EGFR binding protein, and the EGFR binding protein in such embodiments comprises an affinity matured EGFR binding molecule, and is derived from the EGFR binding parental molecule, comprising one or more amino acid mutations (e.g., a stabilizing mutation, a destabilizing mutation) with respect to the EGFR binding parental molecule. In some embodiments, the affinity matured EGFR binding molecule has superior stability with respect to selected destabilizing agents, as that of a reference EGFR binding parental molecule. In some embodiments, the affinity matured EGFR binding molecule is identified in a process comprising panning of one or more pre-candidate EGFR binding molecules derived from one or more EGFR binding parental molecule, expressed in a phage display library, against a EGFR protein, such as a human EGFR protein. The pre-candidate EGFR binding molecule comprises, in some embodiments, amino acid substitutions in the variable regions, CDRs, or framework residues, relative to a parental molecule.

[0199] As used herein, “Phage display” refers to a technique by which variant polypeptides are displayed as fusion proteins to at least a portion of a coat protein on the surface of phage, e.g., filamentous phage, particles. A utility of phage display lies in the fact that large libraries of randomized protein variants can be rapidly and efficiently selected for those sequences that bind to a target molecule with high affinity. Display of peptide and protein libraries on phage has been used for screening millions of polypeptides for ones with specific binding properties. Polyvalent phage display methods have been used for displaying small random peptides and small proteins through fusions to either gene III or gene VIII of filamentous phage. Wells and Lowman, Curr. Opin. Struct. Biol, 3:355-362 (1992), and references cited therein. In monovalent phage display, a protein or peptide library is fused to a gene III or a portion thereof, and expressed at low levels in the presence of wild type gene III protein so that phage particles display one copy or none of the fusion proteins. Avidity effects are reduced relative to polyvalent phage so that selection is on the basis of intrinsic ligand affinity, and phagemid vectors are used, which simplify DNA manipulations. Lowman and Wells, Methods: A companion to Methods in Enzymology, 3:205-0216 (1991).

[0200] In some embodiments, the panning comprises using varying binding times and concentrations to identify EGFR binding molecules with increased or decreased on-rates, from pre-candidate EGFR binding molecules. In some embodiments, the panning comprises using varying wash times to identify EGFR binding molecules with increased or decreased off-rates, from pre-candidate EGFR molecules. In some embodiments, the panning comprises using both varying binding times and varying wash times. In some embodiments, one or more stabilizing mutations are combined to increase the stability of the affinity matured EGFR binding molecule, for example, by shuffling to create a second-stage combinatorial library from such mutants and conducting a second round of panning followed by a binding selection.

[0201] In some embodiments, the affinity matured EGFR binding molecule comprises an equivalent or better affinity to an EGFR protein (such as human EGFR protein) as that of a EGFR binding parental molecule, but that has reduced cross reactivity, or in some embodiments, increased cross reactivity, with selected substances, such as ligands, proteins, antigens, or the like, other than the EGFR epitope for which the EGFR binding parental molecule is specific, or is designed to be specific for. In regard to the latter, an affinity matured EGFR binding molecule, in some embodiments, is more successfully tested in animal models if the affinity matured EGFR binding molecule is reacted with both human EGFR and the corresponding target of the animal model, e.g. mouse EGFR or cynomolgus EGFR. In some embodiments, the parental EGFR binding molecule binds to human EGFR with an affinity of about 10 nM or less, and to cynomolgus EGFR with an affinity of about 15 nM or less. In some embodiments, the affinity matured EGFR binding molecule, identified after one round of panning, binds to human EGFR with an affinity of about 5 nM or less, and to cynomolgus EGFR with an affinity of about 7.5 nM or less. In some embodiments, the affinity matured EGFR binding molecule, identified after two rounds of panning, binds to human EGFR with an affinity of about 2.5 nM or less, and to cynomolgus EGFR with an affinity of about 3.5 nM or less.

[0202] In some embodiments, the EGFR binding protein comprises an antigen-specific binding domain polypeptide that specifically bind to targets, such as targets on diseased cells, or targets on other cells that support the diseased state, such as targets on stromal cells that support tumor growth or targets on immune cells that support disease-mediated immunosuppression. In some examples, the antigen-specific binding domain includes antibodies, single chain antibodies, Fabs, Fv, T-cell receptor binding domains, ligand binding domains, receptor binding domains, domain antibodies, single domain antibodies, minibodies, nanobodies, peptibodies, or various other antibody mimics (such as affimers, affitins, alphabodies, atrimers, CTLA4-based molecules, adnectins, anticalins, Kunitz domain-based proteins, avimers, knottins, fynomers, darpins, affibodies, affilins, monobodies and armadillo repeat protein-based proteins).

[0203] In some embodiments, an anti-EGFR single domain antibody of the EGFR targeting immune cell engaging protein comprises a single domain antibody with an amino acid sequence that corresponds to the amino acid sequence of a naturally occurring VHH domain, but that has been “humanized,” i.e., by replacing one or more amino acid residues in the amino acid sequence of said naturally occurring VHH sequence (and in particular in the framework sequences) by one or more of the amino acid residues that occur at the corresponding position(s) in a VH domain from a conventional 4-chain antibody from a human being (e.g., as indicated above).

[0204] Other suitable methods and techniques for obtaining the anti-EGFR single domain antibody of the disclosure and/or nucleic acids encoding the same, starting from naturally occurring VH sequences or VHH sequences for example comprises combining one or more parts of one or more naturally occurring VH sequences (such as one or more framework (FR) sequences and/or complementarity determining region (CDR) sequences), one or more parts of one or more naturally occurring VHH sequences (such as one or more FR sequences or CDR sequences), and/or one or more synthetic or semi-synthetic sequences, in a suitable manner, so as to provide an anti-EGFR single domain antibody of the disclosure or a nucleotide sequence or nucleic acid encoding the same.

[0205] In some embodiments, the EGFR binding domain is an anti-EGFR specific antibody comprising a heavy chain variable complementarity determining region CDR1, a heavy chain variable CDR2, a heavy chain variable CDR3, a light chain variable CDR1, a light chain variable CDR2, and a light chain variable CDR3. In some embodiments, the EGFR binding domain comprises any domain that binds to EGFR including but not limited to domains from a monoclonal antibody, a polyclonal antibody, a recombinant antibody, a human antibody, a humanized antibody, or antigen binding fragments such as single domain antibodies (sdAb), Fab, Fab′, F(ab)2, and Fv fragments, fragments comprised of one or more CDRs, single-chain antibodies (e.g., single chain Fv fragments (scFv)), disulfide stabilized (dsFv) Fv fragments, heteroconjugate antibodies (e.g., bispecific antibodies), pFv fragments, heavy chain monomers or dimers, light chain monomers or dimers, and dimers consisting of one heavy chain and one light chain. In some embodiments, the EGFR binding domain is a single domain antibody. In some embodiments, the anti-EGFR single domain antibody comprises heavy chain variable complementarity determining regions (CDR), CDR1, CDR2, and CDR3.

[0206] In some embodiments, the EGFR binding domain is a polypeptide comprising an amino acid sequence that is comprised of four framework regions/sequences (f1-f4) interrupted by three complementarity determining regions/sequences, as represented by the formula: f1-r1-f2-r2-f3-r3-f4, wherein r1, r2, and r3 are complementarity determining regions CDR1, CDR2, and CDR3, respectively, and f1, f2, f3, and f4 are framework residues. The framework residues of the EGFR binding protein of the present disclosure comprise, for example, 75, 76, 77, 78, 79, 80, 81, 82, 83, 84, 85, 86, 87, 88, 89, 90, 91, 92, 93, or 94 amino acid residues, and the complementarity determining regions comprise, for example, 24, 25, 26, 27, 28, 29, 30, 31, 32, 33, 34, 35, or 36 amino acid residues. In some embodiments, the EGFR binding domain comprises an amino acid sequence selected from the group consisting of SEQ ID NOS: 798-846.

[0207] In some embodiments, the EGFR binding domains described herein comprise a polypeptide having a sequence selected from the group consisting of SEQ ID NOS: 798-846, subsequences thereof, and variants thereof. In some embodiments, the EGFR binding protein comprises at least 70%-95% or more homology to a sequence selected from the group consisting of SEQ ID NOS: 798-846, subsequences thereof, and variants thereof. In some embodiments, the EGFR binding protein comprises at least 70%, 75%, 80%, 85%, 90%, 95%, 96%, 97%, 98%, 99%, or more homology to a sequence selected from the group consisting of SEQ ID NOS: 798-846, subsequences thereof, and variants thereof. In some embodiments, the EGFR binding protein comprises at least 70%-95% or more identity to a sequence selected from the group consisting of SEQ ID NOS: 798-846, subsequences thereof, and variants thereof. In some embodiments, the EGFR binding protein comprises at least 70%, 75%, 80%, 85%, 90%, 95%, 96%, 97%, 98%, 99% or more identity to a sequence selected from the group consisting of SEQ ID NOS: 798-846, subsequences thereof, and variants thereof.

[0208] In some embodiments, the CDR1 comprises the amino acid sequence as set forth in any one of SEQ ID NOS: 651-699 or a variant having one, two, three, four, five, six, seven, eight, nine, or ten amino acid substitutions in any one of SEQ ID NOS: 651-699. In some embodiments, the CDR2 comprises a sequence as set forth in any one of SEQ ID NOS: 700-748 or a variant having one, two, three, four, five, six, seven, eight, nine, or ten amino acid substitutions in any one of SEQ ID NOS: 700-748. In some embodiments, the CDR3 comprises a sequence as set forth in any one of SEQ ID NOS: 148-196 or a variant having one, two, three, four, five, six, seven, eight, nine, or ten amino acid substitutions in any one of SEQ ID NOS: 749-797.

[0209] In various embodiments, the EGFR binding domain of the present disclosure is at least about 75%, about 76%, about 77%, about 78%, about 79%, about 80%, about 81%, about 82%, about 83%, about 84%, about 85%, about 86%, about 87%, about 88%, about 89%, about 90%, about 91%, about 92%, about 93%, about 94%, about 95%, about 96%, about 97%, about 98%, about 99%, or about 100% identical to an amino acid sequence selected from the group consisting of SEQ ID NOS: 798-846.

[0210] In various embodiments, a complementarity determining region of the EGFR binding domain of the present disclosure is at least about 10%, about 20%, about 30%, about 40%, about 50%, about 60%, about 70%, about 80%, about 81%, about 82%, about 83%, about 84%, about 85%, about 86%, about 87%, about 88%, about 89%, about 90%, about 91%, about 92%, about 93%, about 94%, about 95%, about 96%, about 97%, about 98%, about 99%, or about 100% identical to an amino acid sequence set forth in any one of SEQ ID NOS: 651-699.

[0211] In various embodiments, a complementarity determining region of the EGFR binding domain of the present disclosure is at least about 10%, about 20%, about 30%, about 40%, about 50%, about 60%, about 70%, about 80%, about 81%, about 82%, about 83%, about 84%, about 85%, about 86%, about 87%, about 88%, about 89%, about 90%, about 91%, about 92%, about 93%, about 94%, about 95%, about 96%, about 97%, about 98%, about 99%, or about 100% identical to an amino acid sequence set forth in any one of SEQ ID NOS: 700-748.

[0212] In various embodiments, a complementarity determining region of the EGFR binding domain of the present disclosure is at least about 10%, about 20%, about 30%, about 40%, about 50%, about 60%, about 70%, about 80%, about 81%, about 82%, about 83%, about 84%, about 85%, about 86%, about 87%, about 88%, about 89%, about 90%, about 91%, about 92%, about 93%, about 94%, about 95%, about 96%, about 97%, about 98%, about 99%, or about 100% identical to an amino acid sequence set forth in any one of SEQ ID NOS: 749-797.

[0213] In some embodiments, the EGFR binding domain is cross-reactive with human cynomolgus and mouse EGFR. In some embodiments, the EGFR binding domain is specific for human EGFR. In certain embodiments, the EGFR binding domains disclosed herein bind to human EGFR with a human Kd (hKd). In certain embodiments, the EGFR binding domains disclosed herein bind to cynomolgus EGFR with a cyno Kd (cKd). In certain embodiments, the EGFR binding domains disclosed herein bind to cynomolgus EGFR with a mouse Kd (mKd). In certain embodiments, the EGFR binding domains disclosed herein bind to both cynomolgus EGFR and a human EGFR, with a cyno Kd (cKd) and a human Kd (hKd), respectively. In certain embodiments, the EGFR binding domains disclosed herein bind to cynomolgus EGFR, mouse EGFR, and a human EGFR, with a cyno Kd (cKd), mouse Kd (mKd), and a human Kd (hKd), respectively. In some embodiments, the EGFR binding protein binds to human, mouse and cynomolgus EGFR with comparable binding affinities (i.e., hKd, mKd and cKd values do not differ by more than ±10%). In some embodiments, the hKd, mKd and the cKd range from about 0.1 nM to about 500 nM. In some embodiments, the hKd, mKd and the cKd range from about 0.1 nM to about 450 nM. In some embodiments, the hKd, mKd and the cKd range from about 0.1 nM to about 400 nM. In some embodiments, the hKd, mKd and the cKd range from about 0.1 nM to about 350 nM. In some embodiments, the hKd, mKd and the cKd range from about 0.1 nM to about 300 nM. In some embodiments, the hKd, mKd and the cKd range from about 0.1 nM to about 250 nM. In some embodiments, the hKd, mKd and the cKd range from about 0.1 nM to about 200 nM. In some embodiments, the hKd, mKd and the cKd range from about 0.1 nM to about 150 nM. In some embodiments, the hKd, mKd and the cKd range from about 0.1 nM to about 100 nM. In some embodiments, the hKd, mKd and the cKd range from about 0.1 nM to about 90 nM. In some embodiments, the hKd, mKd and the cKd range from about 0.2 nM to about 80 nM. In some embodiments, the hKd, mKd and the cKd range from about 0.3 nM to about 70 nM. In some embodiments, the hKd, mKd and the cKd range from about 0.4 nM to about 50 nM. In some embodiments, the hKd, mKd and the cKd range from about 0.5 nM to about 30 nM. In some embodiments, the hKd, mKd and the cKd range from about 0.6 nM to about 10 nM. In some embodiments, the hKd, mKd and the cKd range from about 0.7 nM to about 8 nM. In some embodiments, the hKd, mKd and the cKd range from about 0.8 nM to about 6 nM. In some embodiments, the hKd, mKd and the cKd range from about 0.9 nM to about 4 nM. In some embodiments, the hKd, mKd and the cKd range from about 1 nM to about 2 nM.

[0214] In some embodiments, any of the foregoing EGFR binding domains (e.g., anti-EGFR single domain antibodies of SEQ ID NOS: 798-846) are affinity peptide tagged for ease of purification. In some embodiments, the affinity peptide tag is six consecutive histidine residues, also referred to as 6X-His (SEQ ID NO: 3503).

[0215] In certain embodiments, the EGFR binding domains of the present disclosure preferentially bind membrane bound EGFR over soluble EGFR Membrane bound EGFR refers to the presence of EGFR in or on the cell membrane surface of a cell that expresses EGFR. Soluble EGFR refers to EGFR that is no longer on in or on the cell membrane surface of a cell that expresses or expressed EGFR. In certain instances, the soluble EGFR is present in the blood and/or lymphatic circulation in a subject. In one embodiment, the EGFR binding domains bind membrane-bound EGFR at least 5 fold, 10 fold, 15 fold, 20 fold, 25 fold, 30 fold, 40 fold, 50 fold, 100 fold, 500 fold, or 1000 fold greater than soluble EGFR. In one embodiment, the EGFR targeting immune cell engaging proteins of the present disclosure preferentially bind membrane-bound EGFR 30 fold greater than soluble EGFR. Determining the preferential binding of an antigen binding protein to membrane bound EGFR over soluble EGFR can be readily determined using binding assays. It is contemplated that in some embodiments the EGFR binding protein is fairly small and no more than 25 kDa, no more than 20 kDa, no more than 15 kDa, or no more than 10 kDa in some embodiments. In certain instances, the EGFR binding protein is 5 kDa or less if it is a peptide or small molecule entity.

[0216] In other embodiments, the EGFR binding proteins described herein comprise small molecule entity (SME) binders for EGFR. SME binders are small molecules averaging about 500 to 2000 Da in size and are attached to the EGFR binding proteins by known methods, such as sortase ligation or conjugation. In these instances, the EGFR binding protein comprises a domain comprising a sortase recognition sequence, e.g., LPETG (SEQ ID NO: 3200). To attach a SME binder to EGFR binding protein comprising a sortase recognition sequence, the protein is incubated with a sortase and a SME binder whereby the sortase attaches the SME binder to the recognition sequence. In yet other embodiments, the EGFR binding proteins described herein comprise a knottin peptide for binding EGFR. Knottins are disufide-stabilized peptides with a cysteine knot scaffold and have average sizes about 3.5 kDa. Knottins have been contemplated for binding to certain tumor molecules such as EGFR. In further embodiments, the EGFR binding proteins described herein comprise a natural EGFR ligand.

[0217] In some embodiments, the EGFR binding protein comprises more than one domain and are of a single-polypeptide design with flexible linkage of the domains. This allows for facile production and manufacturing of the EGFR binding proteins as they can be encoded by single cDNA molecule to be easily incorporated into a vector. Further, in some embodiments where the EGFR binding proteins described herein are a monomeric single polypeptide chain, there are no chain pairing issues or a requirement for dimerization. It is contemplated that, in such embodiments, the EGFR binding proteins described herein have a reduced tendency to aggregate.

[0218] In the EGFR binding proteins comprising more than one domain, the domains are linked by one or more internal linker. In certain embodiments, the internal linkers are “short,” i.e., consist of 0, 1, 2, 3, 4, 5, 6, 7, 8, 9, 10, 11 or 12 amino acid residues. Thus, in certain instances, the internal linkers consist of about 12 or less amino acid residues. In the case of 0 amino acid residues, the internal linker is a peptide bond. In certain embodiments, the internal linkers are “long,” i.e., consist of 15, 20 or 25 amino acid residues. In some embodiments, the internal linkers consist of about 3 to about 15, for example 8, 9 or 10 contiguous amino acid residues. Regarding the amino acid composition of the internal linkers, peptides are selected with properties that confer flexibility to the EGFR binding proteins, do not interfere with the binding domains as well as resist cleavage from proteases. For example, glycine and serine residues generally provide protease resistance. Examples of internal linkers suitable for linking the domains in the EGFR binding proteins include but are not limited to (GS)ₙ (SEQ ID NO: 3525), (GGS)ₙ(SEQ ID NO: 3526), (GGGS)ₙ (SEQ ID NO: 3527), (GGSG)ₙ (SEQ ID NO: 3528), (GGSGG)ₙ (SEQ ID NO: 3194), (GGGGS)ₙ(SEQ ID NO: 3195), (GGGGG)ₙ(SEQ ID NO: 3196), or (GGG)ₙ (SEQ ID NO: 3197), wherein n is 1, 2, 3, 4, 5, 6, 7, 8, 9, or 10. In one embodiment, the linker is (GGGGSGGGGSGGGGSGGGGS)(SEQ ID NO: 3198), (GGGGSGGGGSGGGGS) (SEQ ID NO: 3199), or (GGGGSGGGS) (SEQ ID NO: 3504).

[0219] In some cases, where the EGFR binding protein comprises more than one domain, the domains within the EGFR binding proteins are conjugated using an enzymatic site-specific conjugation method which involves the use of a mammalian or bacterial transglutaminase enzyme. Microbial transglutaminases (mTGs) are versatile tools in modern research and biotechnology. The availability of large quantities of relatively pure enzymes, ease of use, and lack of regulation by calcium and guanosine-5′-triphosphate (GTP) has propelled mTG to be the main cross-linking enzyme used in both the food industry and biotechnology. Currently, mTGs are used in many applications to attach proteins and peptides to small molecules, polymers, surfaces, DNA, as well as to other proteins. See, e.g., Pavel Strp, Veracity of microbial transglutaminase, Bioconjugate Chem. 25, 5, 855-862).

[0220] In some examples are provided EGFR binding proteins comprising more than one domain, wherein one of the domains comprises an acceptor glutamine in a constant region, which can then be conjugated to another domain via a lysine-based linker (e.g., any primary amine chain which is a substrate for TGase, e.g. comprising an alkylamine, oxoamine) wherein the conjugation occurs exclusively on one or more acceptor glutamine residues present in the targeting moiety outside of the antigen combining site (e.g., outside a variable region, in a constant region). Conjugation thus does not occur on a glutamine, e.g. an at least partly surface exposed glutamine, within the variable region. The EGFR binding protein, in some examples, is formed by reacting one of the domains with a lysine-based linker in the presence of a TGase.

[0221] In some embodiments, where one or more domains within the EGFR binding proteins are directly joined, a hybrid vector is made where the DNA encoding the directly joined domains are themselves directly ligated to each other. In some embodiments, where linkers are used, a hybrid vector is made where the DNA encoding one domain is ligated to the DNA encoding one end of a linker moiety and the DNA encoding another domain is ligated to the other end of the linker moiety.

[0222] In some embodiments, the EGFR binding protein is a single chain variable fragments (scFv), single-domain antibody such as a heavy chain variable domain (VH), a light chain variable domain (VL) and a variable domain (VHH) of camelid derived single domain antibody. In other embodiments, the EGFR binding protein is a non-Ig binding domain, i.e., an antibody mimetic, such as anticalins, affilins, affibody molecules, affimers, affitins, alphabodies, avimers, DARPins, fynomers, kunitz domain peptides, and monobodies. In further embodiments, the EGFR binding protein is a ligand or peptide that binds to or associates with EGFR. In yet further embodiments, the EGFR binding protein is a knottin. In yet further embodiments, the binding domain to EGFR is a small molecular entity.

[0223] In some embodiments, the EGFR binding proteins as set forth above are fused to an Fc region from any species, including but not limited to, human immunoglobulin, such as human IgG1, a human IgG2, a human IgG3, human IgG4, to generate Fc-fusion proteins. In some embodiments, the Fc-fusion proteins of this disclosure have extended half-life compared to an otherwise identical EGFR binding protein. In some embodiments, the Fc-fusion EGFR binding proteins of this disclosure contain inter alia one or more additional amino acid residue substitutions, mutations and/or modifications, e.g., in the Fc region, which result in a binding protein with preferred characteristics including, but not limited to: altered pharmacokinetics, extended serum half-life.

[0224] In some embodiments, such Fc-fused EGFR binding proteins provide extended half-lives in a mammal, such as in a human, of greater than 5 days, greater than 10 days, greater than 15 days, greater than 20 days, greater than 25 days, greater than 30 days, greater than 35 days, greater than 40 days, greater than 45 days, greater than 2 months, greater than 3 months, greater than 4 months, or greater than 5 months. The increased half-life, in some cases, results in a higher serum titer which thus reduces the frequency of the administration of the EGFR binding proteins and/or reduces the concentration of the antibodies to be administered. Binding to human FcRn in vivo and serum half-life of human FcRn high affinity binding polypeptides is assayed, in some examples, in transgenic mice or transfected human cell lines expressing human FcRn, or in primates to which the polypeptides with a variant Fc region are administered.

[0225] The EGFR binding proteins, in some cases, are differentially modified during or after production, e.g., by glycosylation, acetylation, phosphorylation, amidation, derivatization by known protecting/blocking groups, proteolytic cleavage, linkage to an antibody molecule or other cellular ligand, etc. Any of numerous chemical modifications are carried out by techniques, including but not limited, to specific chemical cleavage by cyanogen bromide, trypsin, chymotrypsin, papain, V8 protease, NaBH4, acetylation, formylation, oxidation, reduction, metabolic synthesis in the presence of tunicamycin, etc.

[0226] Various post-translational modifications of the EGFR binding proteins also encompassed by the disclosure include, for example, N-linked or O-linked carbohydrate chains, processing of N-terminal or C-terminal ends, attachment of chemical moieties to the amino acid backbone, chemical modifications of N-linked or O-linked carbohydrate chains, and addition or deletion of an N-terminal methionine residue as a result of prokaryotic host cell expression. Moreover, the EGFR binding proteins are, in some cases, modified with a detectable label, such as an enzymatic, fluorescent, radioisotopic or affinity label to allow for detection and isolation of the modulator.

[0227] In some embodiments, the EGFR binding proteins of the disclosure are monovalent or multivalent bivalent, trivalent, etc.). As used herein, the term “valency” refers to the number of potential target binding sites associated with an antibody. Each target binding site specifically binds one target molecule or specific position or locus on a target molecule. When an antibody is monovalent, each binding site of the molecule will specifically bind to a single antigen position or epitope. When an antibody comprises more than one target binding site (multivalent), each target binding site may specifically bind the same or different molecules (e.g., may bind to different ligands or different antigens, or different epitopes or positions on the same antigen).

### FLT3 Binding Proteins

[0228] FLT3, also known as fetal liver kinase 2 (FLK-2), stem cell tyrosine kinase 1 (STK-1) and CD135, is a member of the class III receptor tyrosine kinases. Normally, FLT3 is expressed on immature myeloid-lymphocytic precursor cells and dendritic cell precursors, but rarely on mature adult cells. FLT3 is overexpressed in approximately 90% of acute myeloid leukemia (AML), a majority of acute lymphocytic leukemia (ALL) and the blast-crisis phase of chronic myeloid leukemia (BC-CML). Stimulation by FLT3 ligand (FL) enhances the proliferation and survival of leukemia cells. Inhibition of FLT3 signaling leads to apoptosis in dendritic cells and inhibition of immune responses. The MAPK, PI3K and Stat5 pathways have been identified to be involved in the downstream signaling of activated FLT3 (See e.g., Stirewalt D L and J P, Radich, J P. Nat Rev Cancer 3:650-665 (2003)).

[0229] Described herein are immune cell engaging proteins that comprise an FLT3 binding domain, pharmaceutical compositions thereof, as well as nucleic acids, recombinant expression vectors and host cells for making such proteins thereof. Also provided are methods of using the disclosed proteins comprising an FLT3 binding domain of this disclosure, in the prevention, and/or treatment of diseases, conditions and disorders. In some embodiments, an FLT3 binding domain of this disclosure inhibits FL-induced phosphorylation of wild-type FLT3 and downstream kinases of MPK, PI3K, and STATS pathways in a disease such as leukemia. In some embodiments, an FLT3 binding domain of this disclosure has an improved ability to activate downstream immune effector functions such as antibody dependent cellular cytotoxicity (ADCC).

[0230] In some embodiments, the FLT3 binding domain binds to a human FLT3 protein comprising a sequence as set forth in SEQ ID NO: 3215 (UniProt ID: P36888). In some embodiments, the FLT3 binding domain binds to a protein comprising a truncated sequence compared to SEQ ID NO: 3215 (UniProt ID: P36888).

[0231] In some embodiments, the FLT3 binding domains disclosed herein recognize full-length FLT3 (e.g., an FLT3 protein comprising the sequence of SEQ ID NO: 3215 (UniProt ID: P36888). In certain instances, the FLT3 binding domains disclosed herein recognize an epitope within FLT3, such as, in some cases the FLT3 binding proteins interact with one or more amino acids found within a domain of human FLT3. The epitope to which the antibodies bind may consist of a single contiguous sequence of 3 or more (e.g., 3, 4, 5, 6, 7, 8, 9, 10, 11, 12, 13, 14, 15, 16, 17, 18, 19, 20 or more) amino acids located within a domain of FLT3 (e.g., an FLT3 protein comprising the sequence of SEQ ID NO: 3215 (UniProt ID: P36888). Alternatively, the epitope may consist of a plurality of non-contiguous amino acids (or amino acid sequences) located within a domain of FLT3 (e.g., an FLT3 protein comprising the sequence of SEQ ID NO: 3215 (UniProt ID: P36888).

[0232] In some embodiments, the FLT3 binding proteins of this disclosure binds to the full length of an FLT3 protein or to a fragment thereof, such as epitope containing fragments within the full length FLT3 protein, as described above. In some cases, the epitope containing fragment comprises antigenic or immunogenic fragments and derivatives thereof of the FLT3 protein. Epitope containing fragments, including antigenic or immunogenic fragments, are, in some embodiments, 12 amino acids or more, e.g., 20 amino acids or more, 50 or 100 amino acids or more. The FLT3 fragments, in some embodiments, comprises 95% or more of the length of the full protein, 90% or more, 75% or 50% or 25% or 10% or more of the length of the full protein. In some embodiments, the epitope-containing fragments of FLT3 including antigenic or immunogenic fragments are capable of eliciting a relevant immune response in a patient. Derivatives of FLT3 include, in some embodiments, variants on the sequence in which one or more (e.g., 1-20 such as 15 amino acids, or up to 20% such as up to 10% or 5% or 1% by number of amino acids based on the total length of the protein) deletions, insertions or substitutions have been made to the FLT3 sequence (e.g., an FLT3 protein comprising the sequence of SEQ ID NO: 3215 (UniProt ID: P36888).

[0233] In some embodiments, substitutions comprise conservative substitutions. Derivatives and variants of, in some examples, have essentially the same biological function as the protein from which they are derived. For instance, derivatives and variants of FLT3 are, in some cases, comparably antigenic or immunogenic to the protein from which they are derived, have either the ligand-binding activity, or the active receptor-complex forming ability, or preferably both, of the protein from which they are derived, and have the same tissue distribution as FLT3.

[0234] In some embodiments, the FLT3 binding protein specifically binds FLT3 with equivalent or better affinity as that of a reference FLT3 binding protein, and the FLT3 binding protein in such embodiments comprises an affinity matured FLT3 binding molecule, and is derived from the FLT3 binding parental molecule, comprising one or more amino acid mutations (e.g., a stabilizing mutation, a destabilizing mutation) with respect to the FLT3 binding parental molecule. In some embodiments, the affinity matured FLT3 binding molecule has superior stability with respect to selected destabilizing agents, as that of a reference FLT3 binding parental molecule. In some embodiments, the affinity matured FLT3 binding molecule is identified in a process comprising panning of one or more pre-candidate FLT3 binding molecules derived from one or more FLT3 binding parental molecule, expressed in a phage display library, against an FLT3 protein, such as a human FLT3 protein. The pre-candidate FLT3 binding molecule comprises, in some embodiments, amino acid substitutions in the variable regions, CDRs, or framework residues, relative to a parental molecule.

[0235] As used herein, “Phage display,” refers to a technique by which variant polypeptides are displayed as fusion proteins to at least a portion of a coat protein on the surface of phage, e.g., filamentous phage, particles. A utility of phage display lies in the fact that large libraries of randomized protein variants can be rapidly and efficiently selected for those sequences that bind to a target molecule with high affinity. Display of peptide and protein libraries on phage has been used for screening millions of polypeptides for ones with specific binding properties. Polyvalent phage display methods have been used for displaying small random peptides and small proteins through fusions to either gene III or gene VIII of filamentous phage. See e.g., Wells and Lowman, Curr. Opin. Struct. Biol, 3:355-362 (1992), and references cited therein. In monovalent phage display, a protein or peptide library is fused to a gene III or a portion thereof, and expressed at low levels in the presence of wild type gene III protein so that phage particles display one copy or none of the fusion proteins. Avidity effects are reduced relative to polyvalent phage so that selection is on the basis of intrinsic ligand affinity, and phagemid vectors are used, which simplify DNA manipulations. See e.g., Lowman and Wells, Methods: A companion to Methods in Enzymology, 3:205-0216 (1991).

[0236] In some embodiments, the panning comprises using varying binding times and concentrations to identify FLT3 binding molecules with increased or decreased on-rates, from pre-candidate FLT3 binding molecules. In some embodiments, the panning comprises using varying wash times to identify FLT3 binding molecules with increased or decreased off-rates, from pre-candidate FLT3 molecules. In some embodiments, the panning comprises using both varying binding times and varying wash times. In some embodiments, one or more stabilizing mutations are combined to increase the stability of the affinity matured FLT3 binding molecule, for example, by shuffling to create a second-stage combinatorial library from such mutants and conducting a second round of panning followed by a binding selection.

[0237] In some embodiments, the affinity matured FLT3 binding molecule comprises an equivalent or better affinity to a FLT3 protein (such as human FLT3 protein) as that of a FLT3 binding parental molecule, but that has reduced cross reactivity, or in some embodiments, increased cross reactivity, with selected substances, such as ligands, proteins, antigens, or the like, other than the FLT3 epitope for which the FLT3 binding parental molecule is specific, or is designed to be specific for. In regard to the latter, an affinity matured FLT3 binding molecule, in some embodiments, is more successfully tested in animal models if the affinity matured FLT3 binding molecule is reacted with both human FLT3 and the corresponding target of the animal model, e.g. mouse FLT3 or cynomolgus FLT3.

[0238] In some embodiments, the FLT3 binding domain is an anti-FLT3 antibody or an antigen binding fragment thereof, or a variant of the anti-FLT3 or an antigen binding fragment thereof. As used herein, the term “variant” refers to variants and derivatives of an antibody or an antigen binding fragment thereof, as described herein. In certain embodiments, amino acid sequence variants of the anti-FLT3 antibodies or antigen binding fragments thereof described herein are contemplated. For example, in certain embodiments amino acid sequence variants of anti-FLT3 antibodies or antigen binding fragments thereof described herein are contemplated to improve the binding affinity and/or other biological properties of the same. Exemplary method for preparing amino acid variants include, but are not limited to, introducing appropriate modifications into the nucleotide sequence encoding the antibody or antigen binding fragments thereof, or by peptide synthesis. Such modifications include, for example, deletions from, and/or insertions into and/or substitutions of residues within the amino acid sequences of the antibody or antigen binding fragments thereof.

[0239] Any combination of deletion, insertion, and substitution can be made to arrive at the final construct, provided that the final construct possesses the desired characteristics, e.g., antigen-binding. In certain embodiments, variants having one or more amino acid substitutions are provided. Sites of interest for substitution mutagenesis include the CDRs and framework regions. Examples of such substitutions are described below. Amino acid substitutions may be introduced into an antibody or antigen binding fragments thereof of interest and the products screened for a desired activity, e.g., retained/improved antigen binding, decreased immunogenicity, altered Antibody dependent cellular cytotoxicity (ADCC), or improved T-cell mediated cytotoxicity (TDCC). Both conservative and non-conservative amino acid substitutions are contemplated for preparing the variants.

[0240] In another example of a substitution to create a variant anti-FLT3 antibody or antigen binding fragments thereof, one or more hypervariable region residues of a parent antibody or antigen binding fragments thereof are substituted. In general, variants are then selected based on improvements in desired properties compared to a parent antibody, for example, increased affinity, reduced affinity, reduced immunogenicity, increased pH dependence of binding.

[0241] In some embodiments, the FLT3 binding domain is a single domain antibody (sdAb), such as a heavy chain variable domain (VH), a variable domain (VHH) of a llama derived sdAb, a peptide, a ligand or a small molecule entity specific for FLT3. In some embodiments, the FLT3 binding domain described herein is any domain that binds to FLT3 including but not limited to domains from a monoclonal antibody, a polyclonal antibody, a recombinant antibody, a human antibody, a humanized antibody. In certain embodiments, the FLT3 binding domain is a single-domain antibody. In other embodiments, the FLT3 binding domain is a peptide. In further embodiments, the FLT3 binding domain is a small molecule.

[0242] In one embodiment, a single domain antibody corresponds to the VHH domains of naturally occurring heavy chain antibodies directed against FLT3. As further described herein, such VHH sequences can generally be generated or obtained by suitably immunizing a species of Llama with FLT3, (i.e., so as to raise an immune response and/or heavy chain antibodies directed against FLT3), by obtaining a suitable biological sample from said Llama (such as a blood sample, serum sample or sample of B-cells), and by generating VHH sequences directed against FLT3, starting from said sample, using any suitable technique.

[0243] In another embodiment, such naturally occurring VHH domains against FLT3, are obtained from naïve libraries of Camelid VHH sequences, for example by screening such a library using FLT3, or at least one part, fragment, antigenic determinant or epitope thereof using one or more screening techniques known in the field. Such libraries and techniques are for example described in WO 99/37681, WO 01/90190, WO 03/025020 and WO 03/035694. Alternatively, improved synthetic or semi-synthetic libraries derived from naïve VHH libraries are used, such as VHH libraries obtained from naïve VHH libraries by techniques such as random mutagenesis and/or CDR shuffling, as for example described in WO 00/43507.

[0244] In a further embodiment, yet another technique for obtaining VHH sequences directed against FLT3, involves suitably immunizing a transgenic mammal that is capable of expressing heavy chain antibodies (i.e., so as to raise an immune response and/or heavy chain antibodies directed against FLT3), obtaining a suitable biological sample from said transgenic mammal (such as a blood sample, serum sample or sample of B-cells), and then generating VHH sequences directed against FLT3, starting from said sample, using any suitable technique known in the field. For example, for this purpose, the heavy chain antibody-expressing rats or mice and the further methods and techniques described in WO 02/085945 and in WO 04/049794 can be used.

[0245] In some embodiments, an anti-FLT3 single domain antibody of this disclosure comprises a single domain antibody with an amino acid sequence that corresponds to the amino acid sequence of a non-human antibody and/or a naturally occurring VHH domain, e.g., a llama anti-FLT3 antibody, but that has been “humanized,” i.e., by replacing one or more amino acid residues in the amino acid sequence of said non-human anti-FLT3 and/or the naturally occurring VHH sequence (and in particular in the framework sequences) by one or more of the amino acid residues that occur at the corresponding position(s) in a VH domain from a conventional 4-chain antibody from a human being (e.g., as indicated above).

[0246] Other suitable methods and techniques for obtaining the anti-FLT3 single domain antibody of the disclosure and/or nucleic acids encoding the same, starting from naturally occurring VH sequences or VHH sequences for example comprises combining one or more parts of one or more naturally occurring VH sequences (such as one or more framework (FR) sequences and/or complementarity determining region (CDR) sequences), one or more parts of one or more naturally occurring VHH sequences (such as one or more FR sequences or CDR sequences), and/or one or more synthetic or semi-synthetic sequences, in a suitable manner, so as to provide an anti-FLT3 single domain antibody of the disclosure or a nucleotide sequence or nucleic acid encoding the same.

[0247] In some embodiments, the FLT3 binding domain is an anti-FLT3 specific antibody comprising a heavy chain variable complementarity determining region CDR1, a heavy chain variable CDR2, a heavy chain variable CDR3, a light chain variable CDR1, a light chain variable CDR2, and a light chain variable CDR3. In some embodiments, the FLT3 binding domain comprises any domain that binds to FLT3 including but not limited to domains from a monoclonal antibody, a polyclonal antibody, a recombinant antibody, a human antibody, a humanized antibody, or antigen binding fragments such as single domain antibodies (sdAb), Fab, Fab′, F(ab)2, and Fv fragments, fragments comprised of one or more CDRs, single-chain antibodies (e.g., single chain Fv fragments (scFv)), disulfide stabilized (dsFv) Fv fragments, heteroconjugate antibodies (e.g., bispecific antibodies), pFv fragments, heavy chain monomers or dimers, light chain monomers or dimers, and dimers consisting of one heavy chain and one light chain. In some embodiments, the FLT3 binding domain is a single domain antibody. In some embodiments, the anti-FLT3 single domain antibody comprises heavy chain variable complementarity determining regions (CDR), CDR1, CDR2, and CDR3.

[0248] In some embodiments, the FLT3 binding domain is a polypeptide comprising an amino acid sequence that is comprised of four framework regions/sequences (f1-f4) interrupted by three complementarity determining regions/sequences, as represented by the formula: f1-r1-f2-r2-f3-r3-f4, wherein r1, r2, and r3 are complementarity determining regions CDR1, CDR2, and CDR3, respectively, and f1, f2, f3, and f4 are framework residues. The framework residues of the FLT3 binding protein of the present disclosure comprise, for example, 75, 76, 77, 78, 79, 80, 81, 82, 83, 84, 85, 86, 87, 88, 89, 90, 91, 92, 93, or 94 amino acid residues, and the complementarity determining regions comprise, for example, 24, 25, 26, 27, 28, 29, 30, 31, 32, 33, 34, 35, or 36 amino acid residues.

[0249] In some embodiments, the binding proteins described herein comprise a polypeptide having a sequence selected from the group consisting of SEQ ID NOS: 1004-1079, subsequences thereof, and variants thereof. In some embodiments, the FLT3 binding protein comprises at least 60%-95% or more homology to a sequence selected from the group consisting of SEQ ID NOS: 1004-1079, subsequences thereof, and variants thereof. In some embodiments, the FLT3 binding protein comprises at least 60%, 61%, 62%, 63%, 63%, 65%, 66%, 67%, 68%, 69%, 70%, 75%, 80%, 85%, 90%, 95%, 96%, 97%, 98%, 99%, or more homology to a sequence selected from the group consisting of SEQ ID NOS: 1004-1079, subsequences thereof, and variants thereof. In some embodiments, the FLT3 binding protein comprises at least 60%-95% or more identity to a sequence selected from the group consisting of SEQ ID NOS: 1004-1079, subsequences thereof, and variants thereof. In some embodiments, the FLT3 binding protein comprises at least 60%, 61%, 62%, 63%, 63%, 65%, 66%, 67%, 68%, 69%, 70%, 75%, 80%, 85%, 90%, 95%, 96%, 97%, 98%, 99%, or more identity to a sequence selected from the group consisting of SEQ ID NOS: 1004-1079, subsequences thereof, and variants thereof.

[0250] In some embodiments, the CDR1 comprises the amino acid sequence selected from the group consisting of SEQ ID NOS: 1080-1155 and 3497-3498, or a sequence comprising one or more amino acid substitutions in a sequence selected from the group consisting of SEQ ID NOS: 1080-1155 and 3497-3498. In some embodiments, the CDR2 comprises the amino acid sequence selected from the group consisting of SEQ ID NOS: 1156-1231 and 3499-3500, or a sequence comprising one or more amino acid substitutions in a sequence selected from the group consisting of SEQ ID NOS: 1156-1231 and 3499-3500. In some embodiments, the CDR3 comprises the amino acid sequence selected from the group consisting of SEQ ID NOS: 1232-1307 and 3501-3502, or a sequence comprising one or more amino acid substitutions in a sequence selected from the group consisting of SEQ ID NOS: 1232-1307, and 3501-3502. In some embodiments, the CDR1 comprises the amino acid sequence selected from the group consisting of SEQ ID NOS: 1150, 1152, 3497, and 3498, or a sequence comprising one or more amino acid substitutions in a sequence selected from the group consisting of SEQ ID NOS: 1150, 1152, 3497, and 3498. In some embodiments, the CDR2 comprises the amino acid sequence selected from the group consisting of SEQ ID NOS: 1226, 1228, 3499, and 3500, or a sequence comprising one or more amino acid substitutions in a sequence selected from the group consisting of SEQ ID NOS: 1226, 1228, 3499, and 3500. In some embodiments, the CDR3 comprises the amino acid sequence selected from the group consisting of SEQ ID NOS: 1302, 1304, 3501, and 3502 or a sequence comprising one or more amino acid substitutions in a sequence selected from the group consisting of SEQ ID NOS: 1293 or 1302.

[0251] In various embodiments, the FLT3 binding domain of the present disclosure is at least about 60%, about 61%, at least about 62%, about 63%, about 64%, about 65%, about 66%, about 67%, about 68%, about 69%, about 70%, about 71%, about 72%, about 73%, about 74%, about 75%, about 76%, about 77%, about 78%, about 79%, about 80%, about 81%, about 82%, about 83%, about 84%, about 85%, about 86%, about 87%, about 88%, about 89%, about 90%, about 91%, about 92%, about 93%, about 94%, about 95%, about 96%, about 97%, about 98%, about 99%, or about 100% identical to an amino acid sequence selected from the group consisting of SEQ ID NOS: 1004-1079 and 3495-3496.

[0252] In various embodiments, a complementarity determining region of the FLT3 binding domain of the present disclosure is at least about 10%, about 20%, about 30%, about 40%, about 50%, about 60%, about 70%, about 80%, about 81%, about 82%, about 83%, about 84%, about 85%, about 86%, about 87%, about 88%, about 89%, about 90%, about 91%, about 92%, about 93%, about 94%, about 95%, about 96%, about 97%, about 98%, about 99%, or about 100% identical to the amino acid sequence set forth in any one of SEQ ID NOS: 1080-1155 and 3497-3498.

[0253] In various embodiments, a complementarity determining region of the FLT3 binding domain of the present disclosure is at least about 10%, about 20%, about 30%, about 40%, about 50%, about 60%, about 70%, about 80%, about 81%, about 82%, about 83%, about 84%, about 85%, about 86%, about 87%, about 88%, about 89%, about 90%, about 91%, about 92%, about 93%, about 94%, about 95%, about 96%, about 97%, about 98%, about 99%, or about 100% identical to the amino acid sequence set forth in SEQ ID NOS: 1156-1231 and 3499-3500.

[0254] In various embodiments, a complementarity determining region of the FLT3 binding domain of the present disclosure is at least about 10%, about 20%, about 30%, about 40%, about 50%, about 60%, about 70%, about 80%, about 81%, about 82%, about 83%, about 84%, about 85%, about 86%, about 87%, about 88%, about 89%, about 90%, about 91%, about 92%, about 93%, about 94%, about 95%, about 96%, about 97%, about 98%, about 99%, or about 100% identical to the amino acid sequence set forth in SEQ ID NOS: 1232-1307 and 3501-3502.

[0255] In various embodiments, a complementarity determining region of the FLT3 binding domain of the present disclosure is at least about 10%, about 20%, about 30%, about 40%, about 50%, about 60%, about 70%, about 80%, about 81%, about 82%, about 83%, about 84%, about 85%, about 86%, about 87%, about 88%, about 89%, about 90%, about 91%, about 92%, about 93%, about 94%, about 95%, about 96%, about 97%, about 98%, about 99%, or about 100% identical to the amino acid sequence set forth in any one of SEQ ID NOS: 1074, 1076, 3495, and 3496 and wherein the FLT3 binding domain comprises a humanized FLT3 binding domain.

[0256] In some embodiments, the FLT3 binding domain is cross-reactive with human cynomolgus (cyno) and mouse FLT3. In some embodiments, the FLT3 binding domain is specific for human FLT3. In certain embodiments, the FLT3 binding domains disclosed herein bind to human FLT3 with a human Kd (hKd). In certain embodiments, the FLT3 binding domains disclosed herein bind to cynomolgus FLT3 with a cyno Kd (cKd). In certain embodiments, the FLT3 binding domains disclosed herein bind to cynomolgus FLT3 with a mouse Kd (mKd). In certain embodiments, the FLT3 binding domains disclosed herein bind to both cynomolgus FLT3 and a human FLT3, with a cyno Kd (cKd) and a human Kd (hKd), respectively. In certain embodiments, the FLT3 binding domains disclosed herein bind to cynomolgus FLT3, mouse FLT3, and a human FLT3, with a cyno Kd (cKd), mouse Kd (mKd), and a human Kd (hKd), respectively. In some embodiments, the FLT3 binding protein binds to human, mouse and cynomolgus FLT3 with comparable binding affinities (i.e., hKd, mKd and cKd values do not differ by more than ±10%). In some embodiments, the hKd, mKd and the cKd range from about 0.1 nM to about 500 nM. In some embodiments, the hKd, mKd and the cKd range from about 0.1 nM to about 450 nM. In some embodiments, the hKd, mKd and the cKd range from about 0.1 nM to about 400 nM. In some embodiments, the hKd, mKd and the cKd range from about 0.1 nM to about 350 nM. In some embodiments, the hKd, mKd and the cKd range from about 0.1 nM to about 300 nM. In some embodiments, the hKd, mKd and the cKd range from about 0.1 nM to about 250 nM. In some embodiments, the hKd, mKd and the cKd range from about 0.1 nM to about 200 nM. In some embodiments, the hKd, mKd and the cKd range from about 0.1 nM to about 150 nM. In some embodiments, the hKd, mKd and the cKd range from about 0.1 nM to about 100 nM. In some embodiments, the hKd, mKd and the cKd range from about 0.1 nM to about 90 nM. In some embodiments, the hKd, mKd and the cKd range from about 0.2 nM to about 80 nM. In some embodiments, the hKd, mKd and the cKd range from about 0.3 nM to about 70 nM. In some embodiments, the hKd, mKd and the cKd range from about 0.4 nM to about 50 nM. In some embodiments, the hKd, mKd and the cKd range from about 0.5 nM to about 30 nM. In some embodiments, the hKd, mKd and the cKd range from about 0.6 nM to about 10 nM. In some embodiments, the hKd, mKd and the cKd range from about 0.7 nM to about 8 nM. In some embodiments, the hKd, mKd and the cKd range from about 0.8 nM to about 6 nM. In some embodiments, the hKd, mKd and the cKd range from about 0.9 nM to about 4 nM. In some embodiments, the hKd, mKd and the cKd range from about 1 nM to about 2 nM.

[0257] In some embodiments, any of the foregoing FLT3 binding domains (e.g., anti-FLT3 single domain antibodies of SEQ ID NOS: 1004-1079) are affinity peptide tagged for ease of purification. In some embodiments, the affinity peptide tag is six consecutive histidine residues, also referred to as 6X-His (SEQ ID NO: 3503). In certain embodiments, the FLT3 binding domains of the present disclosure preferentially bind membrane bound FLT3 over soluble FLT3 Membrane bound FLT3 refers to the presence of FLT3 in or on the cell membrane surface of a cell that expresses FLT3. Soluble FLT3 refers to FLT3 that is no longer on in or on the cell membrane surface of a cell that expresses or expressed FLT3. In certain instances, the soluble FLT3 is present in the blood and/or lymphatic circulation in a subject. In one embodiment, the FLT3 binding domains bind membrane-bound FLT3 at least 5 fold, 10 fold, 15 fold, 20 fold, 25 fold, 30 fold, 40 fold, 50 fold, 100 fold, 500 fold, or 1000 fold greater than soluble FLT3. In one embodiment, the FLT3 binding proteins of the present disclosure preferentially bind membrane-bound FLT3 30 fold greater than soluble FLT3. Determining the preferential binding of an antigen binding protein to membrane bound FLT3 over soluble FLT3 can be readily determined using binding assays.

[0258] It is contemplated that in some embodiments the FLT3 binding protein is fairly small and no more than 25 kDa, no more than 20 kDa, no more than 15 kDa, or no more than 10 kDa in some embodiments. In certain instances, the FLT3 binding protein is 5 kDa or less if it is a peptide or small molecule entity.

[0259] In other embodiments, the FLT3 binding proteins described herein comprise small molecule entity (SME) binders for FLT3. SME binders are small molecules averaging about 500 to 2000 Da in size and are attached to the FLT3 binding proteins by known methods, such as sortase ligation or conjugation. In these instances, the FLT3 binding protein comprises a domain comprising a sortase recognition sequence, e.g., LPETG (SEQ ID NO: 3200). To attach a SME binder to FLT3 binding protein comprising a sortase recognition sequence, the protein is incubated with a sortase and a SME binder whereby the sortase attaches the SME binder to the recognition sequence. In yet other embodiments, the FLT3 binding proteins described herein comprise a knottin peptide for binding FLT3. Knottins are disulfide-stabilized peptides with a cysteine knot scaffold and have average sizes about 3.5 kDa. Knottins have been contemplated for binding to certain tumor molecules such as FLT3. In further embodiments, the FLT3 binding proteins described herein comprise a natural FLT3 ligand.

[0260] In some embodiments, the FLT3 binding protein comprises more than one domain and are of a single-polypeptide design with flexible linkage of the domains. This allows for facile production and manufacturing of the FLT3 binding proteins as they can be encoded by single cDNA molecule to be easily incorporated into a vector. Further, in some embodiments where the FLT3 binding proteins described herein are a monomeric single polypeptide chain, there are no chain pairing issues or a requirement for dimerization. It is contemplated that, in such embodiments, the FLT3 binding proteins described herein have a reduced tendency to aggregate.

[0261] In the FLT3 binding proteins comprising more than one domain, the domains are linked by one or more internal linker. In certain embodiments, the internal linkers are “short,” i.e., consist of 0, 1, 2, 3, 4, 5, 6, 7, 8, 9, 10, 11 or 12 amino acid residues. Thus, in certain instances, the internal linkers consist of about 12 or less amino acid residues. In the case of 0 amino acid residues, the internal linker is a peptide bond. In certain embodiments, the internal linkers are “long,” i.e., consist of 15, 20 or 25 amino acid residues. In some embodiments, the internal linkers consist of about 3 to about 15, for example 8, 9 or 10 contiguous amino acid residues. Regarding the amino acid composition of the internal linkers, peptides are selected with properties that confer flexibility to the FLT3 binding proteins, do not interfere with the binding domains as well as resist cleavage from proteases. For example, glycine and serine residues generally provide protease resistance. Examples of internal linkers suitable for linking the domains in the FLT3 binding proteins include but are not limited to (GS)ₙ (SEQ ID NO: 3525), (GGS)ₙ (SEQ ID NO: 3526), (GGGS)ₙ (SEQ ID NO: 3527), (GGSG)ₙ (SEQ ID NO: 3528), (GGSGG)ₙ (SEQ ID NO: 3194), (GGGGS)ₙ (SEQ ID NO: 3195), (GGGGG)ₙ (SEQ ID NO: 3196), or (GGG)ₙ (SEQ ID NO: 3197), wherein n is 1, 2, 3, 4, 5, 6, 7, 8, 9, or 10. In one embodiment, the linker is (GGGGSGGGGSGGGGSGGGGS) (SEQ ID NO: 3198), (GGGGSGGGGSGGGGS) (SEQ ID NO: 3199), or (GGGGSGGGS) (SEQ ID NO: 3504).

[0262] In some cases, where the FLT3 binding protein comprises more than one domain, the domains within the FLT3 binding proteins are conjugated using an enzymatic site-specific conjugation method which involves the use of a mammalian or bacterial transglutaminase enzyme. Microbial transglutaminases (mTGs) are versatile tools in modern research and biotechnology. The availability of large quantities of relatively pure enzymes, ease of use, and lack of regulation by calcium and guanosine-5′-triphosphate (GTP) has propelled mTG to be the main cross-linking enzyme used in both the food industry and biotechnology. Currently, mTGs are used in many applications to attach proteins and peptides to small molecules, polymers, surfaces, DNA, as well as to other proteins. See e.g., Pavel Strp, Veracity of microbial transglutaminase, Bioconjugate Chem. 25, 5, 855-862.

[0263] In some examples are provided FLT3 binding proteins comprising more than one domain, wherein one of the domains comprises an acceptor glutamine in a constant region, which can then be conjugated to another domain via a lysine-based linker (e.g., any primary amine chain which is a substrate for TGase, e.g. comprising an alkylamine, oxoamine) wherein the conjugation occurs exclusively on one or more acceptor glutamine residues present in the targeting moiety outside of the antigen combining site (e.g., outside a variable region, in a constant region). Conjugation thus does not occur on a glutamine, e.g. an at least partly surface exposed glutamine, within the variable region. The FLT3 binding protein, in some examples, is formed by reacting one of the domains with a lysine-based linker in the presence of a TGase.

[0264] In some embodiments, where one or more domains within the FLT3 binding proteins are directly joined, a hybrid vector is made where the DNA encoding the directly joined domains are themselves directly ligated to each other. In some embodiments, where linkers are used, a hybrid vector is made where the DNA encoding one domain is ligated to the DNA encoding one end of a linker moiety and the DNA encoding another domain is ligated to the other end of the linker moiety.

[0265] In some embodiments, the FLT3 binding protein is a single chain variable fragments (scFv), single-domain antibody such as a heavy chain variable domain (VH), a light chain variable domain (VL) and a variable domain (VHH) of camelid derived single domain antibody. In other embodiments, the FLT3 binding protein is a non-Ig binding domain, i.e., an antibody mimetic, such as anticalins, affilins, affibody molecules, affimers, affitins, alphabodies, avimers, DARPins, fynomers, kunitz domain peptides, and monobodies. In further embodiments, the FLT3 binding protein is a ligand or peptide that binds to or associates with FLT3. In yet further embodiments, the FLT3 binding protein is a knottin. In yet further embodiments, the binding domain to FLT3 is a small molecular entity.

[0266] In certain embodiments, the FLT3 binding proteins according to the present disclosure may be incorporated into immune cell engaging proteins. In some embodiments, the immune cell engaging proteins comprise a CD3 binding domain, a half-life extension domain, and an FLT3 binding domain according to this disclosure. In some embodiments, the FLT3 binding trispecific protein comprises a trispecific antibody.

### EpCAM Binding Proteins

[0267] Described herein are immune cell engaging proteins that bind EpCAM, pharmaceutical compositions thereof, as well as nucleic acids, recombinant expression vectors and host cells for making such proteins thereof. Also provided are methods of using the disclosed EpCAM binding proteins in the prevention, and/or treatment of diseases, conditions and disorders. In some embodiments, the EpCAM binding proteins are part of immune cell engaging proteins that comprise an EpCAM binding domain as described herein.

[0268] The epithelial cell adhesion molecule (EpCAM) is a membrane glycoprotein that is expressed in most normal human epithelia and overexpressed in most carcinomas. This molecule is responsible for cell-to-cell adhesion and additionally participates in signaling, cell migration, proliferation and differentiation. Therefore, EpCAM has been the target of immunotherapy in clinical trials of several solid tumors. It has been found to play an important role in the detection and isolation of circulating tumor cells (CTCs). EpCAM has been shown in various studies to be beneficial in diagnosis and therapy of various carcinomas. Furthermore, in many cases, tumor cells were observed to express EpCAM to a much higher degree than their parental epithelium or less aggressive forms of said cancers. For example, EpCAM expression was shown to be significantly higher on neoplastic tissue and in adenocarcinoma than on normal prostate epithelium (n=76; p<0.0001), suggesting that increased EpCAM expression represents an early event in the development of prostate cancer. See Poczatek, J Urol., 1999, 162, 1462-1644. In addition, in the majority of both squamous and adenocarcinomas of the cervix a strong EpCAM expression has been shown to correlate with an increased proliferation and the disappearance of markers for terminal differentiation. See Litvinov, Am. J. Pathol. 1996, 148, 865-75. One example is breast cancer where overexpression of EpCAM on tumor cells is a predictor of survival. See Gastl, Lancet. 2000, 356, 1981-1982. Furthermore, EpCAM has been described as a marker for the detection of disseminated tumor cells in patients suffering from squamous cell carcinoma of the head, neck and lung. See Chaubal, Anticancer Res 1999, 19, 2237-2242, Piyathilake, Hum Pathol. 2000, 31, 482-487. Normal squamous epithelium, as found in epidermis, oral cavity, epiglottis, pharynx, larynx and esophagus did not significantly express EpCAM. See Quak, Hybridoma, 1990, 9, 377-387.

[0269] EpCAM is contemplated to serve to adhere epithelial cells in an oriented and highly ordered fashion. See Litvinov, J Cell Biol. 1997, 139, 1337-1348. Upon malignant transformation of epithelial cells the rapidly growing tumor cells are believed to abandon the high cellular order of epithelia. Consequently, the surface distribution of EpCAM is contemplated to become less restricted and the molecule better exposed on tumor cells. Due to their epithelial cell origin, tumor cells from most carcinomas are expected to express EpCAM on their surface.

[0270] EpCAM, is a 40-kDa membrane-integrated glycoprotein of 314 amino acids with specific expression in certain epithelia and on many human carcinomas. See, e.g., in Balzar, J. Mol. Med. 1999, 77, 699-712). EpCAM was discovered and subsequently cloned through its recognition by the murine monoclonal antibody 17-1A/edrecolomab. See Goettlinger, Int J Cancer. 1986; 38, 47-53 and Simon, Proc. Natl. Acad. Sci. USA. 1990; 87, 2755-2759. Monoclonal antibody 17-1A was generated by immunization of mice with human colon carcinoma cells. See Koprowski, Somatic Cell Genet. 1979, 5, 957-971. The EGF-like repeats of EpCAM were shown to mediate lateral and reciprocal interactions in homophilic cell adhesion. See, e.g., Balzar, Mol. Cell. Biol. 2001, 21, 2570-2580) and, for that reason, is predominantly located between epithelial cells (Litvinov, J Cell Biol. 1997, 139, 1337-1348, Balzar, J Mol Med. 1999, 77, 699-712 and Trebak, J Biol Chem. 2001, 276, 2299-2309).

[0271] EpCAM is also known by the following alternate names: Epithelial Cell Adhesion Molecule, Tumor-Associated Calcium Signal Transducer, Major Gastrointestinal Tumor-Associated Protein GA733-2, Adenocarcinoma-Associated Antigen, Cell Surface Glycoprotein Trop-1, Epithelial Glycoprotein 314, TACSTD1, EGP314, MIC18, TROP1, M4S1, KSA, Membrane Component Chromosome 4 Surface marker (35 kD glycoprotein), Antigen identified by monoclonal antibody AUA-1, human epithelial glycoprotein-2, epithelial cell surface antigen, epithelial glycoprotein, KS ¼Antigen, CD326 Antigen, GA722-2, HEGP314, HNPCC8, Ep-CAM, DIAR5, EGP-2, EGP40, KS ¼, MK-1, M1S2, ESA, and EGP. Exemplary protein sequences for EpCAM is provided in UniProtkB ID Nos. P16422 and B5MCA4. In some embodiments, the EpCAM binding proteins of this disclosure binds to an EpCAM sequence provided in UniProtkB ID Nos. P16422 (SEQ ID NO:478) or B5MCA4 (SEQ ID NO: 475).

[0272] In some embodiments, the EpCAM binding domain binds to an extracellular domain of the mature EpCAM protein. The human extracellular domain sequence is provided in SEQ ID NO: 3212; the cynomolgus extracellular domain sequence is provided in SEQ ID NO: 3213; and the mouse extracellular domain sequence is provided in SEQ ID NO: 3214.

[0273] In some embodiments, the EpCAM binding domain binds to a protein comprising a truncated sequence compared to SEQ ID NO: 3208. In some embodiments, the EPCAM binding domain binds to a protein comprising the sequence of SEQ ID NO: 3208. In some embodiments, the EpCAM binding domain binds to a protein comprising a truncated sequence compared to SEQ ID NO: 3209. In some embodiments, the EpCAM binding domain binds to a protein comprising the sequence of SEQ ID NO: 3209. In some embodiments, the EpCAM binding domain binds to a protein comprising a truncated sequence compared to SEQ ID NO: 3210. In some embodiments, the EpCAM binding domain binds to a protein comprising a truncated sequence compared to SEQ ID NO: 3210. In some embodiments, the EpCAM binding domain binds to a protein comprising a truncated sequence compared to SEQ ID NO: 478. In some embodiments, the EpCAM binding domain binds to a protein comprising a truncated sequence compared to SEQ ID NO: 3211. In some embodiments, the EpCAM binding domain binds to a protein comprising a truncated sequence compared to SEQ ID NO: 3212. In some embodiments, the EpCAM binding domain binds to a protein comprising a truncated sequence compared to SEQ ID NO: 3212. In some embodiments, the EpCAM binding domain binds to a protein comprising a truncated sequence compared to SEQ ID NO: 3213. In some embodiments, the EpCAM binding domain binds to a protein comprising a truncated sequence compared to SEQ ID NO: 3213. In some embodiments, the EpCAM binding domain binds to a protein comprising a truncated sequence compared to SEQ ID NO: 3214. In some embodiments, the EpCAM binding domain binds to a protein comprising a truncated sequence compared to SEQ ID NO: 3214.

[0274] In some embodiments, the EpCAM binding domains disclosed herein recognize full-length EpCAM. In certain instances, the EpCAM binding domains disclosed herein recognize an epitope within EpCAM, such as, in some cases the EpCAM binding proteins interact with one or more amino acids found within a domain of human EpCAM. The epitope to which the antibodies bind may consist of a single contiguous sequence of 3 or more (e.g., 3, 4, 5, 6, 7, 8, 9, 10, 11, 12, 13, 14, 15, 16, 17, 18, 19, 20 or more) amino acids located within a domain of EpCAM. Alternatively, the epitope may consist of a plurality of non-contiguous amino acids (or amino acid sequences) located within a domain of EpCAM.

[0275] In some embodiments, the EpCAM binding proteins of this disclosure binds to the full length EpCAM protein or to a fragment thereof, such as epitope containing fragments within the full length EpCAM protein, as described above. In some cases, the epitope containing fragment comprises antigenic or immunogenic fragments and derivatives thereof of the EpCAM protein. Epitope containing fragments, including antigenic or immunogenic fragments, are, in some embodiments, 12 amino acids or more, e.g., 20 amino acids or more, 50 or 100 amino acids or more. The EpCAM fragments, in some embodiments, comprises 95% or more of the length of the full protein, 90% or more, 75% or 50% or 25% or 10% or more of the length of the full protein. In some embodiments, the epitope-containing fragments of EpCAM including antigenic or immunogenic fragments are capable of eliciting a relevant immune response in a patient. Derivatives of EpCAM include, in some embodiments, variants on the sequence in which one or more (e.g., 1-20 such as 15 amino acids, or up to 20% such as up to 10% or 5% or 1% by number of amino acids based on the total length of the protein) deletions, insertions or substitutions have been made to the EpCAM sequence provided in SEQ ID NOS: 3208-3214.

[0276] In some embodiments, substitutions comprise conservative substitutions. Derivatives and variants of, in some examples, have essentially the same biological function as the protein from which they are derived. For instance, derivatives and variants of EpCAM are, in some cases, comparably antigenic or immunogenic to the protein from which they are derived, have either the ligand-binding activity, or the active receptor-complex forming ability, or preferably both, of the protein from which they are derived, and have the same tissue distribution as EpCAM.

[0277] In some embodiments, the EpCAM binding protein specifically binds EpCAM with equivalent or better affinity as that of a reference EpCAM binding protein, and the EpCAM binding protein in such embodiments comprises an affinity matured EpCAM binding molecule, and is derived from the EpCAM binding parental molecule, comprising one or more amino acid mutations (e.g., a stabilizing mutation, a destabilizing mutation) with respect to the EpCAM binding parental molecule. In some embodiments, the affinity matured EpCAM binding molecule has superior stability with respect to selected destabilizing agents, as that of a reference EpCAM binding parental molecule. In some embodiments, the affinity matured EpCAM binding molecule is identified in a process comprising panning of one or more pre-candidate EpCAM binding molecules derived from one or more EpCAM binding parental molecule, expressed in a phage display library, against an EpCAM protein, such as a human EpCAM protein. The pre-candidate EpCAM binding molecule comprises, in some embodiments, amino acid substitutions in the variable regions, CDRs, or framework residues, relative to a parental molecule.

[0278] As used herein, “Phage display” refers to a technique by which variant polypeptides are displayed as fusion proteins to at least a portion of a coat protein on the surface of phage, e.g., filamentous phage, particles. A utility of phage display lies in the fact that large libraries of randomized protein variants can be rapidly and efficiently selected for those sequences that bind to a target molecule with high affinity. Display of peptide and protein libraries on phage has been used for screening millions of polypeptides for ones with specific binding properties. Polyvalent phage display methods have been used for displaying small random peptides and small proteins through fusions to either gene III or gene VIII of filamentous phage. See e.g., Wells and Lowman, Curr. Opin. Struct. Biol, 3:355-362 (1992), and references cited therein. In monovalent phage display, a protein or peptide library is fused to a gene III or a portion thereof, and expressed at low levels in the presence of wild type gene III protein so that phage particles display one copy or none of the fusion proteins. Avidity effects are reduced relative to polyvalent phage so that selection is on the basis of intrinsic ligand affinity, and phagemid vectors are used, which simplify DNA manipulations. See e.g., Lowman and Wells, Methods: A companion to Methods in Enzymology, 3:205-0216 (1991).

[0279] In some embodiments, the panning comprises using varying binding times and concentrations to identify EpCAM binding molecules with increased or decreased on-rates, from pre-candidate EpCAM binding molecules. In some embodiments, the panning comprises using varying wash times to identify EpCAM binding molecules with increased or decreased off-rates, from pre-candidate EpCAM molecules. In some embodiments, the panning comprises using both varying binding times and varying wash times. In some embodiments, one or more stabilizing mutations are combined to increase the stability of the affinity matured EpCAM binding molecule, for example, by shuffling to create a second-stage combinatorial library from such mutants and conducting a second round of panning followed by a binding selection.

[0280] In some embodiments, the affinity matured EpCAM binding molecule comprises an equivalent or better affinity to a EpCAM protein (such as human EpCAM protein) as that of a EpCAM binding parental molecule, but that has reduced cross reactivity, or in some embodiments, increased cross reactivity, with selected substances, such as ligands, proteins, antigens, or the like, other than the EpCAM epitope for which the EpCAM binding parental molecule is specific, or is designed to be specific for. In regard to the latter, an affinity matured EpCAM binding molecule, in some embodiments, is more successfully tested in animal models if the affinity matured EpCAM binding molecule is reacted with both human EpCAM and the corresponding target of the animal model, e.g. mouse EpCAM or cynomolgus EpCAM. In some embodiments, the parental EpCAM binding molecule binds to human EpCAM with an affinity of about 500 nM or less, 400 nM or less, 300 nM or less, 200 nM or less, 100 nM or less, 50 nM or less, 10 nM or less, and to cynomolgus EpCAM with an affinity of about 500 nM or less, 400 nM or less, 300 nM or less, 200 nM or less, 100 nM or less, 50 nM or less, 15 nM or less, or 10 nM or less. In some embodiments, the affinity matured EpCAM binding molecule, identified after one round of panning, binds to human EpCAM with an affinity of about 5 nM or less, such as 1 nM or less, and to cynomolgus EpCAM with an affinity of about 7.5 nM or less, such as 1 nM or less. In some embodiments, the affinity matured EpCAM binding molecule, identified after two rounds of panning, binds to human EpCAM with an affinity of about 2.5 nM or less, and to cynomolgus EpCAM with an affinity of about 3.5 nM or less.

[0281] In some embodiments, the EpCAM binding protein comprises an antigen-specific binding domain polypeptide that specifically bind to targets, such as targets on diseased cells, or targets on other cells that support the diseased state, such as targets on stromal cells that support tumor growth or targets on immune cells that support disease-mediated immunosuppression. In some examples, the antigen-specific binding domain includes antibodies, single chain antibodies, Fabs, Fv, T-cell receptor binding domains, ligand binding domains, receptor binding domains, domain antibodies, single domain antibodies, minibodies, nanobodies, peptibodies, or various other antibody mimics (such as affimers, affitins, alphabodies, atrimers, CTLA4-based molecules, adnectins, anticalins, Kunitz domain-based proteins, avimers, knottins, fynomers, darpins, affibodies, affilins, monobodies and armadillo repeat protein-based proteins).

[0282] In some embodiments, the EpCAM binding domain is an anti-EpCAM antibody or an antigen binding fragment thereof, or an antibody variant of the EpCAM binding domain or an antigen binding fragment thereof. As used herein, the term “antibody variant” refers to variants and derivatives of an antibody or an antigen binding fragment as described herein. In certain embodiments, amino acid sequence variants of the anti-EpCAM antibodies or antigen binding fragments thereof, as described herein, are contemplated. For example, in certain embodiments amino acid sequence variants of anti-EpCAM antibodies or antigen binding fragments thereof, as described herein, are contemplated to improve the binding affinity and/or other biological properties of the same. Exemplary method for preparing amino acid variants include, but are not limited to, introducing appropriate modifications into the nucleotide sequence encoding the antibody or antigen binding fragment thereof, or by peptide synthesis. Such modifications include, for example, deletions from, and/or insertions into and/or substitutions of residues within the amino acid sequences of the antibody or antigen binding fragments thereof.

[0283] Any combination of deletion, insertion, and substitution can be made to arrive at the final construct, provided that the final construct possesses the desired characteristics, e.g., antigen-binding. In certain embodiments, variants having one or more amino acid substitutions are provided. Sites of interest for substitution mutagenesis include the CDRs and framework regions. Examples of such substitutions are described below. Amino acid substitutions may be introduced into an antibody or antigen binding fragments thereof of interest and the products screened for a desired activity, e.g., retained/improved antigen binding, decreased immunogenicity, altered Antibody dependent cellular cytotoxicity (ADCC), or improved T-cell mediated cytotoxicity (TDCC). Both conservative and non-conservative amino acid substitutions are contemplated for preparing the antibody variants.

[0284] In another example of a substitution to create a variant anti-EpCAM antibody or antigen binding fragments thereof, one or more hypervariable region residues of a parent antibody are substituted. In general, variants are then selected based on improvements in desired properties compared to a parent antibody or antigen binding fragments thereof, for example, increased affinity, reduced affinity, reduced immunogenicity, increased pH dependence of binding.

[0285] In some embodiments, the EpCAM binding domain is a single domain antibody (sdAb) such as a heavy chain variable domain (VH), a variable domain (VHH) of a llama derived sdAb, a peptide, a ligand or a small molecule entity specific for EpCAM. In some embodiments, the EpCAM binding domain described herein is any domain that binds to EpCAM including but not limited to domains from a monoclonal antibody, a polyclonal antibody, a recombinant antibody, a human antibody, a humanized antibody. In certain embodiments, the EpCAM binding domain is a single-domain antibody. In other embodiments, the EpCAM binding domain is a peptide. In further embodiments, the EpCAM binding domain is a small molecule.

[0286] In one embodiment, a single domain antibody corresponds to the VHH domains of naturally occurring heavy chain antibodies directed against EpCAM. As further described herein, such VHH sequences can generally be generated or obtained by suitably immunizing a species of Llama with EpCAM, (i.e., so as to raise an immune response and/or heavy chain antibodies directed against EpCAM), by obtaining a suitable biological sample from said Llama (such as a blood sample, serum sample or sample of B-cells), and by generating VHH sequences directed against EpCAM, starting from said sample, using any suitable technique known in the field.

[0287] In another embodiment, such naturally occurring VHH domains against EpCAM, are obtained from naïve libraries of Camelid VHH sequences, for example by screening such a library using EpCAM, or at least one part, fragment, antigenic determinant or epitope thereof using one or more screening techniques known in the field. Such libraries and techniques are for example described in WO 99/37681, WO 01/90190, WO 03/025020 and WO 03/035694. Alternatively, improved synthetic or semi-synthetic libraries derived from naïve VHH libraries are used, such as VHH libraries obtained from naïve VHH libraries by techniques such as random mutagenesis and/or CDR shuffling, as for example described in WO 00/43507.

[0288] In a further embodiment, yet another technique for obtaining VHH sequences directed against EpCAM, involves suitably immunizing a transgenic mammal that is capable of expressing heavy chain antibodies (i.e., so as to raise an immune response and/or heavy chain antibodies directed against EpCAM), obtaining a suitable biological sample from said transgenic mammal (such as a blood sample, serum sample or sample of B-cells), and then generating VHH sequences directed against EpCAM, starting from said sample, using any suitable technique known in the field. For example, for this purpose, the heavy chain antibody-expressing rats or mice and the further methods and techniques described in WO 02/085945 and in WO 04/049794 can be used.

[0289] In some embodiments, an anti-EpCAM single domain antibody of this disclosure comprises a single domain antibody with an amino acid sequence that corresponds to the amino acid sequence of a non-human antibody and/or a naturally occurring VHH domain, e.g., a llama anti-EpCAM antibody, but that has been “humanized,” i.e., by replacing one or more amino acid residues in the amino acid sequence of said non-human anti-EpCAM and/or the naturally occurring VHH sequence (and in particular in the framework sequences) by one or more of the amino acid residues that occur at the corresponding position(s) in a VH domain from a conventional 4-chain antibody from a human being (e.g., as indicated above).

[0290] Other suitable methods and techniques for obtaining the anti-EpCAM single domain antibody of the disclosure and/or nucleic acids encoding the same, starting from naturally occurring VH sequences or VHH sequences for example comprises combining one or more parts of one or more naturally occurring VH sequences (such as one or more framework (FR) sequences and/or complementarity determining region (CDR) sequences), one or more parts of one or more naturally occurring VHH sequences (such as one or more FR sequences or CDR sequences), and/or one or more synthetic or semi-synthetic sequences, in a suitable manner, so as to provide an anti-EpCAM single domain antibody of the disclosure or a nucleotide sequence or nucleic acid encoding the same.

[0291] In some embodiments, the EpCAM binding domain is an anti-EpCAM specific antibody comprising a heavy chain variable complementarity determining region CDR1, a heavy chain variable CDR2, a heavy chain variable CDR3, a light chain variable CDR1, a light chain variable CDR2, and a light chain variable CDR3. In some embodiments, the EpCAM binding domain comprises any domain that binds to EpCAM including but not limited to domains from a monoclonal antibody, a polyclonal antibody, a recombinant antibody, a human antibody, a humanized antibody, or antigen binding fragments such as single domain antibodies (sdAb), Fab, Fab′, F(ab)2, and Fv fragments, fragments comprised of one or more CDRs, single-chain antibodies (e.g., single chain Fv fragments (scFv)), disulfide stabilized (dsFv) Fv fragments, heteroconjugate antibodies (e.g., bispecific antibodies), pFv fragments, heavy chain monomers or dimers, light chain monomers or dimers, and dimers consisting of one heavy chain and one light chain. In some embodiments, the EpCAM binding domain is a single domain antibody. In some embodiments, the anti-EpCAM single domain antibody comprises heavy chain variable complementarity determining regions (CDR), CDR1, CDR2, and CDR3.

[0292] In some embodiments, the EpCAM binding domain is a polypeptide comprising an amino acid sequence that is comprised of four framework regions/sequences (f1-f4) interrupted by three complementarity determining regions/sequences, as represented by the formula: f1-r1-f2-r2-f3-r3-f4, wherein r1, r2, and r3 are complementarity determining regions CDR1, CDR2, and CDR3, respectively, and f1, f2, f3, and f4 are framework residues. The framework residues of the EpCAM binding protein of the present disclosure comprise, for example, 75, 76, 77, 78, 79, 80, 81, 82, 83, 84, 85, 86, 87, 88, 89, 90, 91, 92, 93, or 94 amino acid residues, and the complementarity determining regions comprise, for example, 24, 25, 26, 27, 28, 29, 30, 31, 32, 33, 34, 35, or 36 amino acid residues. In some embodiments, the EpCAM binding domain comprises an amino acid sequence selected from the group consisting of SEQ ID NOS: 961-1003.

[0293] In some embodiments, the EpCAM binding protein comprises at least 60%, 61%, 62%, 63%, 63%, 65%, 66%, 67%, 68%, 69%, 70%, 75%, 80%, 85%, 90%, 95%, 96%, 97%, 98%, 99%, or more homology to a sequence selected from the group consisting of SEQ ID NOS: 961-1003, subsequences thereof, and variants thereof. In some embodiments, the EpCAM binding protein comprises at least 70%-95% or more identity to a sequence selected from the group consisting of SEQ ID NOS: 961-1003, subsequences thereof, and variants thereof. In some embodiments, the EpCAM binding protein comprises at least 60%, 61%, 62%, 63%, 63%, 65%, 66%, 67%, 68%, 69%, 70%, 75%, 80%, 85%, 90%, 95%, 96%, 97%, 98%, 99% or more identity to a sequence selected from the group consisting of SEQ ID NOS: 961-1003, subsequences thereof, and variants thereof.

[0294] In some embodiments, the CDR1 comprises the amino acid sequence as set forth in any one of SEQ ID NOS: 847-884 or a sequence comprising one or more substitutions compared to a sequence selected from the group consisting of SEQ ID NOS: 847-884. In some embodiments, the CDR2 comprises a sequence as set forth in any one of SEQ ID NOS:885-922 or a sequence comprising one or more substitutions compared to a sequence selected from the group consisting of SEQ ID NOS: 885-922. In some embodiments, the CDR3 comprises a sequence as set forth in any one of SEQ ID NOS: 923-960 a sequence comprising one or more substitutions compared to a sequence selected from the group consisting of SEQ ID NOS: 923-960.

[0295] In various embodiments, the EpCAM binding domain of the present disclosure is at least about 60%, about 61%, at least about 62%, about 63%, about 64%, about 65%, about 66%, about 67%, about 68%, about 69%, about 70%, about 71%, about 72%, about 73%, about 74%, about 75%, about 76%, about 77%, about 78%, about 79%, about 80%, about 81%, about 82%, about 83%, about 84%, about 85%, about 86%, about 87%, about 88%, about 89%, about 90%, about 91%, about 92%, about 93%, about 94%, about 95%, about 96%, about 97%, about 98%, about 99%, or about 100% identical to an amino acid sequence selected from the group consisting of SEQ ID NOS: 961-1003.

[0296] In various embodiments, a complementarity determining region of the EpCAM binding domain of the present disclosure is at least about 10%, about 20%, about 30%, about 40%, about 50%, about 60%, about 70%, about 80%, about 81%, about 82%, about 83%, about 84%, about 85%, about 86%, about 87%, about 88%, about 89%, about 90%, about 91%, about 92%, about 93%, about 94%, about 95%, about 96%, about 97%, about 98%, about 99%, or about 100% identical to the amino acid sequence set forth in any one of SEQ ID NOS: 847-884.

[0297] In various embodiments, a complementarity determining region of the EpCAM binding domain of the present disclosure is at least about 10%, about 20%, about 30%, about 40%, about 50%, about 60%, about 70%, about 80%, about 81%, about 82%, about 83%, about 84%, about 85%, about 86%, about 87%, about 88%, about 89%, about 90%, about 91%, about 92%, about 93%, about 94%, about 95%, about 96%, about 97%, about 98%, about 99%, or about 100% identical to the amino acid sequence set forth in any one of SEQ ID NOS: 885-922.

[0298] In various embodiments, a complementarity determining region of the EpCAM binding domain of the present disclosure is at least about 10%, about 20%, about 30%, about 40%, about 50%, about 60%, about 70%, about 80%, about 81%, about 82%, about 83%, about 84%, about 85%, about 86%, about 87%, about 88%, about 89%, about 90%, about 91%, about 92%, about 93%, about 94%, about 95%, about 96%, about 97%, about 98%, about 99%, or about 100% identical to the amino acid sequence set forth in any one of SEQ ID NOS: 923-960.

[0299] In some embodiments, the EpCAM binding domain is cross-reactive with human cynomolgus and mouse EpCAM. In some embodiments, the EpCAM binding domain is specific for human EpCAM. In certain embodiments, the EpCAM binding domains disclosed herein bind to human EpCAM with a human Kd (hKd). In certain embodiments, the EpCAM binding domains disclosed herein bind to cynomolgus EpCAM with a cyno Kd (cKd). In certain embodiments, the EpCAM binding domains disclosed herein bind to cynomolgus EpCAM with a mouse Kd (mKd). In certain embodiments, the EpCAM binding domains disclosed herein bind to both cynomolgus EpCAM and a human EpCAM, with a cyno Kd (cKd) and a human Kd (hKd), respectively. In certain embodiments, the EpCAM binding domains disclosed herein bind to cynomolgus EpCAM, mouse EpCAM, and a human EpCAM, with a cyno Kd (cKd), mouse Kd (mKd), and a human Kd (hKd), respectively. In some embodiments, the EpCAM binding protein binds to human, mouse and cynomolgus EpCAM with comparable binding affinities (i.e., hKd, mKd and cKd values do not differ by more than ±10%). In some embodiments, the hKd, mKd and the cKd range from about 0.001 nM to about 500 nM. In some embodiments, the hKd, mKd and the cKd range from about 0.001 nM to about 450 nM. In some embodiments, the hKd, mKd and the cKd range from about 0.001 nM to about 400 nM. In some embodiments, the hKd, mKd and the cKd range from about 0.001 nM to about 350 nM. In some embodiments, the hKd, mKd and the cKd range from about 0.001 nM to about 300 nM. In some embodiments, the hKd, mKd and the cKd range from about 0.001 nM to about 250 nM. In some embodiments, the hKd, mKd and the cKd range from about 0.001 nM to about 200 nM. In some embodiments, the hKd, mKd and the cKd range from about 0.001 nM to about 150 nM. In some embodiments, the hKd, mKd and the cKd range from about 0.001 nM to about 100 nM. In some embodiments, the hKd, mKd and the cKd range from about 0.1 nM to about 90 nM. In some embodiments, the hKd, mKd and the cKd range from about 0.2 nM to about 80 nM. In some embodiments, the hKd, mKd and the cKd range from about 0.3 nM to about 70 nM. In some embodiments, the hKd, mKd and the cKd range from about 0.4 nM to about 50 nM. In some embodiments, the hKd, mKd and the cKd range from about 0.5 nM to about 30 nM. In some embodiments, the hKd, mKd and the cKd range from about 0.6 nM to about 10 nM. In some embodiments, the hKd, mKd and the cKd range from about 0.7 nM to about 8 nM. In some embodiments, the hKd, mKd and the cKd range from about 0.8 nM to about 6 nM. In some embodiments, the hKd, mKd and the cKd range from about 0.9 nM to about 4 nM. In some embodiments, the hKd, mKd and the cKd range from about 1 nM to about 2 nM.

[0300] In some embodiments, any of the foregoing EpCAM binding domains (e.g., anti-EpCAM single domain antibodies of SEQ ID NOS: 961-1003) are affinity peptide tagged for ease of purification. In some embodiments, the affinity peptide tag is six consecutive histidine residues, also referred to as 6X-His (SEQ ID NO: 3503).

[0301] In certain embodiments, the EpCAM binding domains of the present disclosure preferentially bind membrane bound EpCAM over soluble EpCAM Membrane bound EpCAM refers to the presence of EpCAM in or on the cell membrane surface of a cell that expresses EpCAM. Soluble EpCAM refers to EpCAM that is no longer on in or on the cell membrane surface of a cell that expresses or expressed EpCAM. In certain instances, the soluble EpCAM is present in the blood and/or lymphatic circulation in a subject. In one embodiment, the EpCAM binding domains bind membrane-bound EpCAM at least 5 fold, 10 fold, 15 fold, 20 fold, 25 fold, 30 fold, 40 fold, 50 fold, 100 fold, 500 fold, or 1000 fold greater than soluble EpCAM. In one embodiment, the EpCAM binding proteins of the present disclosure preferentially bind membrane-bound EpCAM 30 fold greater than soluble EpCAM. Determining the preferential binding of an antigen binding protein to membrane bound EpCAM over soluble EpCAM can be readily determined using binding assays.

[0302] It is contemplated that in some embodiments the EpCAM binding protein is fairly small and no more than 25 kDa, no more than 20 kDa, no more than 15 kDa, or no more than 10 kDa in some embodiments. In certain instances, the EpCAM binding protein is 5 kDa or less if it is a peptide or small molecule entity.

[0303] In other embodiments, the EpCAM binding proteins described herein comprise small molecule entity (SME) binders for EpCAM. SME binders are small molecules averaging about 500 to 2000 Da in size and are attached to the EpCAM binding proteins by known methods, such as sortase ligation or conjugation. In these instances, the EpCAM binding protein comprises a domain comprising a sortase recognition sequence, e.g., LPETG (SEQ ID NO: 3200). To attach a SME binder to EpCAM binding protein comprising a sortase recognition sequence, the protein is incubated with a sortase and a SME binder whereby the sortase attaches the SME binder to the recognition sequence. In yet other embodiments, the EpCAM binding proteins described herein comprise a knottin peptide for binding EpCAM. Knottins are disufide-stabilized peptides with a cysteine knot scaffold and have average sizes about 3.5 kDa. Knottins have been contemplated for binding to certain tumor molecules such as EpCAM. In further embodiments, the EPCAM binding proteins described herein comprise a natural EpCAM ligand.

[0304] In some embodiments, the EpCAM binding protein comprises more than one domain and are of a single-polypeptide design with flexible linkage of the domains. This allows for facile production and manufacturing of the EpCAM binding proteins as they can be encoded by single cDNA molecule to be easily incorporated into a vector. Further, in some embodiments where the EpCAM binding proteins described herein are a monomeric single polypeptide chain, there are no chain pairing issues or a requirement for dimerization. It is contemplated that, in such embodiments, the EpCAM binding proteins described herein have a reduced tendency to aggregate.

[0305] In the EpCAM binding proteins comprising more than one domain, the domains are linked by one or more internal linker. In certain embodiments, the internal linkers are “short,” i.e., consist of 0, 1, 2, 3, 4, 5, 6, 7, 8, 9, 10, 11 or 12 amino acid residues. Thus, in certain instances, the internal linkers consist of about 12 or less amino acid residues. In the case of 0 amino acid residues, the internal linker is a peptide bond. In certain embodiments, the internal linkers are “long,” i.e., consist of 15, 20 or 25 amino acid residues. In some embodiments, the internal linkers consist of about 3 to about 15, for example 8, 9 or 10 contiguous amino acid residues. Regarding the amino acid composition of the internal linkers, peptides are selected with properties that confer flexibility to the EpCAM binding proteins, do not interfere with the binding domains as well as resist cleavage from proteases. For example, glycine and serine residues generally provide protease resistance. Examples of internal linkers suitable for linking the domains in the EpCAM binding proteins include but are not limited to (GS)ₙ (SEQ ID NO: 3525), (GGS)ₙ (SEQ ID NO: 3526), (GGGS)ₙ (SEQ ID NO: 3527), (GGSG)ₙ (SEQ ID NO: 3528), (GGSGG)ₙ (SEQ ID NO: 3194), (GGGGS)ₙ (SEQ ID NO: 3195), (GGGGG)ₙ (SEQ ID NO: 3196), or (GGG)ₙ (SEQ ID NO: 3197), wherein n is 1, 2, 3, 4, 5, 6, 7, 8, 9, or 10. In one embodiment, the linker is (GGGGSGGGGSGGGGSGGGGS) (SEQ ID NO: 3198), (GGGGSGGGGSGGGGS) (SEQ ID NO: 3199), or (GGGGSGGGS) (SEQ ID NO: 3504).

[0306] In some cases, where the EpCAM binding protein comprises more than one domain, the domains within the EpCAM binding proteins are conjugated using an enzymatic site-specific conjugation method which involves the use of a mammalian or bacterial transglutaminase enzyme. Microbial transglutaminases (mTGs) are versatile tools in modern research and biotechnology. The availability of large quantities of relatively pure enzymes, ease of use, and lack of regulation by calcium and guanosine-5′-triphosphate (GTP) has propelled mTG to be the main cross-linking enzyme used in both the food industry and biotechnology. Currently, mTGs are used in many applications to attach proteins and peptides to small molecules, polymers, surfaces, DNA, as well as to other proteins. See, e.g., Pavel Strp, Veracity of microbial transglutaminase, Bioconjugate Chem. 25, 5, 855-862.

[0307] In some examples are provided EpCAM binding proteins comprising more than one domain, wherein one of the domains comprises an acceptor glutamine in a constant region, which can then be conjugated to another domain via a lysine-based linker (e.g., any primary amine chain which is a substrate for TGase, e.g. comprising an alkylamine, oxoamine) wherein the conjugation occurs exclusively on one or more acceptor glutamine residues present in the targeting moiety outside of the antigen combining site (e.g., outside a variable region, in a constant region). Conjugation thus does not occur on a glutamine, e.g. an at least partly surface exposed glutamine, within the variable region. The EpCAM binding protein, in some examples, is formed by reacting one of the domains with a lysine-based linker in the presence of a TGase.

[0308] In some embodiments, where one or more domains within the EpCAM binding proteins are directly joined, a hybrid vector is made where the DNA encoding the directly joined domains are themselves directly ligated to each other. In some embodiments, where linkers are used, a hybrid vector is made where the DNA encoding one domain is ligated to the DNA encoding one end of a linker moiety and the DNA encoding another domain is ligated to the other end of the linker moiety.

[0309] In some embodiments, the EpCAM binding protein is a single chain variable fragments (scFv), single-domain antibody such as a heavy chain variable domain (VH), a light chain variable domain (VL) and a variable domain (VHH) of camelid derived single domain antibody. In other embodiments, the EpCAM binding protein is a non-Ig binding domain, i.e., an antibody mimetic, such as anticalins, affilins, affibody molecules, affimers, affitins, alphabodies, avimers, DARPins, fynomers, kunitz domain peptides, and monobodies. In further embodiments, the EpCAM binding protein is a ligand or peptide that binds to or associates with EpCAM. In yet further embodiments, the EpCAM binding protein is a knottin. In yet further embodiments, the binding domain to EpCAM is a small molecular entity.

[0310] In certain embodiments, the EpCAM binding proteins according to the present disclosure may be incorporated into immune cell engaging proteins. In some embodiments, the immune cell engaging proteins comprise a CD3 binding domain, a half-life extension domain, and an EpCAM binding domain according to this disclosure. In some embodiments, the immune cell engaging protein comprises a trispecific antibody.

### CD3 Binding Domain

[0311] The immune cell engaging protein described herein comprises an immune cell engaging domain. In some embodiments, the immune cell engaging domain comprises a natural killer (NK) cell engaging domain, a T cell engaging domain, a B cell engaging domain, a dendritic cell engaging domain, a macrophage cell engaging domain, or a combination thereof. In some embodiments, the immune cell engaging protein comprises a T-cell engaging domain. In some embodiments, the T cell engaging domain is a CD3 binding domain.

[0312] The specificity of the response of T cells is mediated by the recognition of antigen (displayed in context of a major histocompatibility complex, MHC) by the T cell receptor complex. As part of the T cell receptor complex, CD3 is a protein complex that includes a CD3γ (gamma) chain, a CD3δ (delta) chain, and two CD3ε (epsilon) chains which are present on the cell surface. CD3 associates with the α (alpha) and β (beta) chains of the T cell receptor (TCR) as well as and CD3ζ (zeta) altogether to comprise the T cell receptor complex. Clustering of CD3 on T cells, such as by immobilized anti-CD3 antibodies leads to T cell activation similar to the engagement of the T cell receptor but independent of its clone-typical specificity.

[0313] In one aspect, the single chain variable fragment CD3 binding proteins described herein comprise a domain which specifically binds to CD3. In one aspect, the single chain variable fragment CD3 binding proteins described herein comprise a domain which specifically binds to human CD3. In one aspect, the single chain variable fragment CD3 binding proteins described herein comprise a domain which specifically binds to cynomolgus CD3. In one aspect, the single chain variable fragment CD3 binding proteins described herein comprise a domain which binds to human CD3 and cynomolgus CD3. In some embodiments, the single chain variable fragment CD3 binding proteins described herein comprise a domain which specifically binds to CD3γ. In some embodiments, the single chain variable fragment CD3 binding proteins described herein comprise a domain which specifically binds to CD3δ. In some embodiments, the single chain variable fragment CD3 binding proteins described herein comprise a domain which specifically binds to CD38.

[0314] In another aspect is provided an immune cell engaging protein comprising a single chain variable fragment CD3 binding protein according to the present disclosure. In some embodiments, the immune cell engaging protein comprising a single chain variable fragment CD3 binding protein according to the present disclosure specifically binds to the T cell receptor (TCR). In certain instances, the immune cell engaging protein comprising a single chain variable fragment CD3 binding protein according to the present disclosure binds the α chain of the TCR. In certain instances, the immune cell engaging protein comprising a single chain variable fragment CD3 binding protein according to the present disclosure binds the β chain of the TCR.

[0315] In certain embodiments, the CD3 binding domain of the immune cell engaging protein described herein exhibit not only potent CD3 binding affinities with human CD3, but show also excellent crossreactivity with the respective cynomolgus monkey CD3 proteins. In some instances, the CD3 binding domain of the immune cell engaging protein binding proteins are cross-reactive with CD3 from cynomolgus monkey. In certain instances, the Kd for binding human CD3 (hKd) is about the same as the Kd for binding cynomolgus CD3 (cKd). In certain instances, the ratio between hKd and cKd (hKd:cKd) is between about 20:1 to about 1:2.

[0316] In some embodiments, the CD3 binding domain of immune cell engaging protein can be any domain that binds to CD3 including but not limited to domains from a monoclonal antibody, a polyclonal antibody, a recombinant antibody, a human antibody, a humanized antibody. In some instances, it is beneficial for the CD3 binding domain to be derived from the same species in which the immune cell engaging protein will ultimately be used. For example, for use in humans, it may be beneficial for the CD3 binding domain to comprise human or humanized residues from the antigen binding domain of an antibody or antibody fragment.

[0317] Thus, in one aspect, the antigen-binding domain comprises a humanized or human antibody or an antibody fragment, or a murine antibody or antibody fragment. In one embodiment, the humanized or human anti-CD3 binding domain comprises one or more (e.g., all three) light chain complementary determining region 1 (LC CDR1), light chain complementary determining region 2 (LC CDR2), and light chain complementary determining region 3 (LC CDR3) of a humanized or human anti-CD3 binding domain described herein, and/or one or more (e.g., all three) heavy chain complementary determining region 1 (HC CDR1), heavy chain complementary determining region 2 (CDR2), and heavy chain complementary determining region 3 (CDR3) of a humanized or human anti-CD3 binding domain described herein, e.g., a humanized or human anti-CD3 binding domain comprising one or more, e.g., all three, LC CDRs and one or more, e.g., all three, HC CDRs.

[0318] In some embodiments, the humanized or human anti-CD3 binding domain comprises a humanized or human light chain variable region specific to CD3 where the light chain variable region specific to CD3 comprises human or non-human light chain CDRs in a human light chain framework region. In certain instances, the light chain framework region is a λ (lambda) light chain framework. In other instances, the light chain framework region is a κ (kappa) light chain framework.

[0319] In some embodiments, the humanized or human anti-CD3 binding domain comprises a humanized or human heavy chain variable region specific to CD3 where the heavy chain variable region specific to CD3 comprises human or non-human heavy chain CDRs in a human heavy chain framework region.

[0320] In certain instances, the complementary determining regions of the heavy chain and/or the light chain are derived from known anti-CD3 antibodies, such as, for example, muromonab-CD3 (OKT3), otelixizumab (TRX4), teplizumab (MGA031), visilizumab (Nuvion), SP34, TR-66 or X35-3, VIT3, BMA030 (BW264/56), CLB-T3/3, CRIS7, YTH12.5, F111-409, CLB-T3.4.2, TR-66, WT32, SPv-T3b, 11D8, XIII-141, XIII-46, XIII-87, 12F6, T3/RW2-8C8, T3/RW2-4B6, OKT3D, M-T301, SMC2, F101.01, UCHT-1 and WT-31.

[0321] In one embodiment, the anti-CD3 binding domain is a single chain variable fragment (scFv) comprising a light chain and a heavy chain of an amino acid sequence provided herein. As used herein, “single chain variable fragment” or “scFv” refers to an antibody fragment comprising a variable region of a light chain and at least one antibody fragment comprising a variable region of a heavy chain, wherein the light and heavy chain variable regions are contiguously linked via a short flexible polypeptide linker, and capable of being expressed as a single polypeptide chain, and wherein the scFv retains the specificity of the intact antibody from which it is derived. In an embodiment, the anti-CD3 binding domain comprises: a light chain variable region comprising an amino acid sequence having at least one, two or three modifications (e.g., substitutions) but not more than 30, 20 or 10 modifications (e.g., substitutions) of an amino acid sequence of a light chain variable region provided herein, or a sequence with 95-99% identity with an amino acid sequence provided herein; and/or a heavy chain variable region comprising an amino acid sequence having at least one, two or three modifications (e.g., substitutions) but not more than 30, 20 or 10 modifications (e.g., substitutions) of an amino acid sequence of a heavy chain variable region provided herein, or a sequence with 95-99% identity to an amino acid sequence provided herein. In one embodiment, the humanized or human anti-CD3 binding domain is a scFv, and a light chain variable region comprising an amino acid sequence described herein, is attached to a heavy chain variable region comprising an amino acid sequence described herein, via a scFv linker. The light chain variable region and heavy chain variable region of a scFv can be, e.g., in any of the following orientations: light chain variable region-scFv linker-heavy chain variable region or heavy chain variable region-scFv linker-light chain variable region.

[0322] In some instances, scFvs which bind to CD3 are prepared according to known methods. For example, scFv molecules can be produced by linking VH and VL regions together using flexible polypeptide linkers. The scFv molecules comprise a scFv linker (e.g., a Ser-Gly linker) with an optimized length and/or amino acid composition. Accordingly, in some embodiments, the length of the scFv linker is such that the VH or VL domain can associate intermolecularly with the other variable domain to form the CD3 binding site. In certain embodiments, such scFv linkers are “short”, i.e. consist of 0, 1, 2, 3, 4, 5, 6, 7, 8, 9, 10, 11 or 12 amino acid residues. Thus, in certain instances, the scFv linkers consist of about 12 or less amino acid residues. In the case of 0 amino acid residues, the scFv linker is a peptide bond. In some embodiments, these scFv linkers consist of about 3 to about 15, for example 8, 10 or 15 contiguous amino acid residues. Regarding the amino acid composition of the scFv linkers, peptides are selected that confer flexibility, do not interfere with the variable domains as well as allow inter-chain folding to bring the two variable domains together to form a functional CD3 binding site. For example, scFv linkers comprising glycine and serine residues generally provide protease resistance. In some embodiments, linkers in a scFv comprise glycine and serine residues. The amino acid sequence of the scFv linkers can be optimized, for example, by phage-display methods to improve the CD3 binding and production yield of the scFv. Examples of peptide scFv linkers suitable for linking a variable light chain domain and a variable heavy chain domain in a scFv include but are not limited to (GS)ₙ (SEQ ID NO: 3525), (GGS)ₙ (SEQ ID NO: 3526), (GGGS)ₙ (SEQ ID NO: 3527), (GGSG)ₙ (SEQ ID NO: 3528), (GGSGG)ₙ (SEQ ID NO: 3194), (GGGGS)ₙ (SEQ ID NO: 3195), (GGGGG)ₙ (SEQ ID NO: 3196), or (GGG)ₙ (SEQ ID NO: 3197), wherein n is 1, 2, 3, 4, 5, 6, 7, 8, 9, or 10. In one embodiment, the scFv linker can be (GGGGS)₄ (SEQ ID NO: 3198) or (GGGGS)₃ (SEQ ID NO: 3199). Variation in the linker length may retain or enhance activity, giving rise to superior efficacy in activity studies.

[0323] In some embodiments, CD3 binding domain of an immune cell engaging protein has an affinity to CD3 on CD3 expressing cells with a K_{d} of 1000 nM or less, 500 nM or less, 200 nM or less, 100 nM or less, 80 nM or less, 50 nM or less, 20 nM or less, 10 nM or less, 5 nM or less, 1 nM or less, or 0.5 nM or less. In some embodiments, the CD3 binding domain of a single chain variable fragment CD3 binding protein has an affinity to CD3ε, γ, or δ with a K_{d} of 1000 nM or less, 500 nM or less, 200 nM or less, 100 nM or less, 80 nM or less, 50 nM or less, 20 nM or less, 10 nM or less, 5 nM or less, 1 nM or less, or 0.5 nM or less. In further embodiments, CD3 binding domain of a single chain variable fragment CD3 binding protein has low affinity to CD3, i.e., about 100 nM or greater.

[0324] In certain embodiments, the single chain variable fragment CD3 binding proteins described herein bind to human CD3 with a human Kd (hKd) and to cynomolgus CD3 with a cyno Kd (cKd). In some embodiments, hKd and cKd are between about between about 1 nM to about 2 nM, about 3 nM to about 5 nM, about 6 nM to about 10 nM, about 11 nM to about 20 nM, about 25 nM to about 40 nM, about 40 nM to about 60 nM, about 70 nM to about 90 nM, about 100 nM to about 120 nM, about 125 nM to about 140 nM, about 145 nM to about 160 nM, about 170 nM and to about 200 nM, about 210 nM to about 250 nM, about 260 nM to about 300 nM.

[0325] In some embodiments, the hKd and cKd of the single chain variable fragment CD3 binding proteins is about the same as the Kd of a CD3 binding protein having the sequence as set forth is SEQ ID NO: 3167. In some embodiments, the hKd and cKd of the single chain variable fragment CD3 binding proteins is about 1.1 fold to about 1.5 fold the Kd of a CD3 binding protein having the sequence as set forth is SEQ ID NO: 3167. In some embodiments, the hKd and cKd of the single chain variable fragment CD3 binding proteins is about 1.5 fold to about 2 fold the Kd of a CD3 binding protein having the sequence as set forth is SEQ ID NO: 3167. In some embodiments, the hKd and cKd of the single chain variable fragment CD3 binding proteins is about 2.5 fold to about 3 fold the Kd of a CD3 binding protein having the sequence as set forth is SEQ ID NO: 3167. In some embodiments, the hKd and cKd of the single chain variable fragment CD3 binding proteins is about 3 fold to about 5 fold the Kd of a CD3 binding protein having the sequence as set forth is SEQ ID NO: 3167. In some embodiments, the hKd and cKd of the single chain variable fragment CD3 binding proteins is about 6 fold to about 15 fold the Kd of a CD3 binding protein having the sequence as set forth is SEQ ID NO: 3167. In some embodiments, the hKd and cKd of the single chain variable fragment CD3 binding proteins is about 15 fold to about 20 fold the Kd of a CD3 binding protein having the sequence as set forth is SEQ ID NO: 3167. In some embodiments, the hKd and cKd of the single chain variable fragment CD3 binding proteins is about 20 fold to about 50 fold the Kd of a CD3 binding protein having the sequence as set forth is SEQ ID NO: 3167. In some embodiments, the hKd and cKd of the single chain variable fragment CD3 binding proteins is about 55 fold to about 70 fold the Kd of a CD3 binding protein having the sequence as set forth is SEQ ID NO: 3167. In some embodiments, the hKd and cKd of the single chain variable fragment CD3 binding proteins is about 75 fold to about 100 fold the Kd of a CD3 binding protein having the sequence as set forth is SEQ ID NO: 3167. In some embodiments, the hKd and cKd of the single chain variable fragment CD3 binding proteins is about 120 fold to about 200 fold the Kd of a CD3 binding protein having the sequence as set forth is SEQ ID NO: 3167.

[0326] In some embodiments, the ratio between the hKd and cKd (hKd: cKd) ranges from about 20:1 to about 1:2. The affinity to bind to CD3 can be determined, for example, by the ability of the single chain variable fragment CD3 binding protein itself or its CD3 binding domain to bind to CD3 coated on an assay plate; displayed on a microbial cell surface; in solution; etc. The binding activity of the single chain variable fragment CD3 binding protein itself or its CD3 binding domain of the present disclosure to CD3 can be assayed by immobilizing the ligand (e.g., CD3) or the single chain variable fragment CD3 binding protein itself or its CD3 binding domain, to a bead, substrate, cell, etc. Agents can be added in an appropriate buffer and the binding partners incubated for a period of time at a given temperature. After washes to remove unbound material, the bound protein can be released with, for example, SDS, buffers with a high or low pH, and the like and analyzed, for example, by Surface Plasmon Resonance (SPR).

[0327] In some embodiments, the single chain variable fragment CD3 binding protein has an amino acid sequence selected from the group consisting of SEQ ID NOS: 3153-3169.

[0328] In some embodiments, the single chain variable fragment CD3 binding protein has an amino acid sequence set forth as SEQ ID NO: 3153, wherein the hKd is about 3.8 nM, and wherein the cKd is about 3.5 nM. In some embodiments, the single chain variable fragment CD3 binding protein has an amino acid sequence set forth as SEQ ID NO: 3154, wherein the hKd is about 4.1 nM, and wherein the cKd is about 3.4 nM. In some embodiments, the single chain variable fragment CD3 binding protein has an amino acid sequence set forth as SEQ ID NO: 3155, wherein the hKd is about 4.3 nM, and wherein the cKd is about 4.2 nM. In some embodiments, the single chain variable fragment CD3 binding protein has an amino acid sequence set forth as SEQ ID NO: 3156, wherein the hKd is about 4.7 nM, and wherein the cKd is about 4.9 nM. In some embodiments, the single chain variable fragment CD3 binding protein has an amino acid sequence set forth as SEQ ID NO: 3157, wherein the hKd is about 6.4 nM, and wherein the cKd is about 6.6 nM. In some embodiments, the single chain variable fragment CD3 binding protein has an amino acid sequence set forth as SEQ ID NO: 3158, wherein the hKd is about 8 nM, and wherein the cKd is about 6.6 nM. In some embodiments, the single chain variable fragment CD3 binding protein has an amino acid sequence set forth as SEQ ID NO: 3159, wherein the hKd is about 20 nM, and wherein the cKd is about 17 nM. In some embodiments, the single chain variable fragment CD3 binding protein has an amino acid sequence set forth as SEQ ID NO: 3160, wherein the hKd is about 37 nM, and wherein the cKd is about 30 nM. In some embodiments, the single chain variable fragment CD3 binding protein has an amino acid sequence set forth as SEQ ID NO: 3161, wherein the hKd is about 14 nM, and wherein the cKd is about 13 nM. In some embodiments, the single chain variable fragment CD3 binding protein has an amino acid sequence set forth as SEQ ID NO: 3162, wherein the hKd is about 50 nM, and wherein the cKd is about 47 nM. In some embodiments, the single chain variable fragment CD3 binding protein has an amino acid sequence set forth as SEQ ID NO: 3163, wherein the hKd is about 16 nM, and wherein the cKd is about 16 nM. In some embodiments, the single chain variable fragment CD3 binding protein has an amino acid sequence set forth as SEQ ID NO: 3164, wherein the hKd is about 46 nM, and wherein the cKd is about 43 nM. In some embodiments, the single chain variable fragment CD3 binding protein has an amino acid sequence set forth as SEQ ID NO: 3165, wherein the hKd is about 18 nM, and wherein the cKd is about 17 nM. In some embodiments, the single chain variable fragment CD3 binding protein has an amino acid sequence set forth as SEQ ID NO: 3166, wherein the hKd is about 133 nM, and wherein the cKd is about 134 nM. In some embodiments, the single chain variable fragment CD3 binding protein has an amino acid sequence set forth as SEQ ID NO: 3168, wherein the hKd is about 117 nM, and wherein the cKd is about 115 nM. In some embodiments, the single chain variable fragment CD3 binding protein has an amino acid sequence set forth as SEQ ID NO: 3169, wherein the hKd is about 109 nM, and wherein the cKd is about 103 nM.

### Single Domain Serum Albumin Binding Protein

[0329] The immune cell engaging protein described herein is a half-life extended protein. In some embodiments, the immune cell engaging protein comprises a domain binds to serum albumin. In some embodiments, the serum albumin is human serum albumin (HSA).

[0330] Serum albumin is produced by the liver, occurs dissolved in blood plasma and is the most abundant blood protein in mammals. Albumin is essential for maintaining the oncotic pressure needed for proper distribution of body fluids between blood vessels and body tissues; without albumin, the high pressure in the blood vessels would force more fluids out into the tissues. It also acts as a plasma carrier by non-specifically binding several hydrophobic steroid hormones and as a transport protein for hemin and fatty acids. Human serum albumin (HSA) (molecular mass ˜67 kDa) is the most abundant protein in plasma, present at about 50 mg/ml (600 μM), and has a half-life of around 20 days in humans. HSA serves to maintain plasma pH, contributes to colloidal blood pressure, functions as carrier of many metabolites and fatty acids, and serves as a major drug transport protein in plasma. In some embodiments, the single domain serum albumin binding proteins bind to HSA. In some embodiments, the single domain serum albumin binding proteins bind to serum albumin protein from cynomolgus monkeys. In some embodiments, the single domain serum albumin binding proteins bind to HSA and serum albumin protein from cynomolgus monkeys. In some embodiments, the single domain serum albumin binding proteins also bind to mouse serum albumin protein. In some embodiments, the binding affinity towards mouse serum albumin is about 1.5-fold to about 20-fold weaker than that towards human or cynomolgus serum albumin.

[0331] Noncovalent association with albumin extends the elimination half-time of short-lived proteins. For example, a recombinant fusion of an albumin binding domain to a Fab fragment resulted in a decrease in in vivo clearance by 25-fold and 58-fold and a half-life extension of 26-fold and 37-fold when administered intravenously to mice and rabbits respectively as compared to the administration of the Fab fragment alone. In another example, when insulin is acylated with fatty acids to promote association with albumin, a protracted effect was observed when injected subcutaneously in rabbits or pigs. Together, these studies demonstrate a linkage between albumin binding and prolonged action/serum half-life.

[0332] In some embodiments, the single-domain serum albumin binding proteins described herein is a single domain antibody such as a heavy chain variable domain (VH), a variable domain (VHH) of camelid derived sdAb, peptide, ligand or small molecule entity specific for serum albumin. In some embodiments, the single-domain serum albumin binding proteins described herein is a single domain antibody such as a heavy chain variable domain (VH), a variable domain (VHH) of camelid derived sdAb, peptide, ligand or small molecule entity specific for HSA. In some embodiments, the serum albumin binding domain of a single domain serum albumin binding protein described herein is any domain that binds to serum albumin including but not limited to domains from a monoclonal antibody, a polyclonal antibody, a recombinant antibody, a human antibody, a humanized antibody. In certain embodiments, the serum albumin binding domain is a single-domain antibody. In other embodiments, the serum albumin binding domain is a peptide. In further embodiments, the serum albumin binding domain is a small molecule. It is contemplated that the single domain serum albumin binding protein is fairly small and no more than 25 kD, no more than 20 kD, no more than 15 kD, or no more than 10 kD in some embodiments. In certain instances, the single domain serum albumin binding protein binding is 5 kD or less if it is a peptide or small molecule entity.

[0333] In some embodiments, the single domain serum albumin binding protein described herein is a half-life extension domain which provides for altered pharmacodynamics and pharmacokinetics of the single domain serum albumin binding protein itself. As above, the half-life extension domain extends the elimination half-time. The half-life extension domain also alters pharmacodynamic properties including alteration of tissue distribution, penetration, and diffusion of the single domain serum albumin binding protein. In some embodiments, the half-life extension domain provides for improved tissue (including tumor) targeting, tissue distribution, tissue penetration, diffusion within the tissue, and enhanced efficacy as compared with a protein without a half-life extension domain. In one embodiment, therapeutic methods effectively and efficiently utilize a reduced amount of the single domain serum albumin binding protein, resulting in reduced side effects, such as reduced non-tumor cell cytotoxicity.

[0334] Further, the binding affinity of the single domain serum albumin binding protein towards its binding target can be selected so as to target a specific elimination half-time in a particular single domain serum albumin binding protein. Thus, in some embodiments, the single domain serum albumin binding protein has a high binding affinity towards its binding target. In other embodiments, the single domain serum albumin binding protein has a medium binding affinity towards its binding target. In yet other embodiments, the single domain serum albumin binding protein has a low or marginal binding affinity towards its binding target. Exemplary binding affinities include KD of 10 nM or less (high), between 10 nM and 100 nM (medium), and greater than 100 nM (low). As above, binding affinities of the single domain serum albumin binding proteins towards binding targets are determined by known methods such as Surface Plasmon Resonance (SPR).

[0335] In certain embodiments, the single domain serum albumin binding protein disclosed herein binds to HSA with a human Kd (hKd). In certain embodiments, the single domain serum albumin binding protein disclosed herein binds to cynomolgus monkey serum albumin with a cyno Kd (cKd). In certain embodiments, the single domain serum albumin binding protein disclosed herein binds to cynomolgus monkey serum albumin with a cyno Kd (cKd) and to HSA with a human Kd (hKd). In some embodiments, the hKd ranges between 1 nM and 100 nM. In some embodiments, the hKd ranges between 1 nM and 10 nM. In some embodiments, the cKd ranges between 1 nM and 100 nM. In some embodiments, the cKd ranges between 1 nM and 10 nM. In some embodiments, the hKd and the cKd range between about 1 nM and about 5 nM or between about 5 nM and 10 nM. In some embodiments, the single domain serum albumin binding protein binds to serum albumin selected from among human serum albumin, cynomolgus serum albumin, and mouse serum albumin. In some embodiments, the single domain serum albumin binding protein binds to human serum albumin, cynomolgus serum albumin, and mouse serum albumin with comparable binding affinity (Kd). In some embodiments, the single domain serum albumin binding protein binds to human serum albumin with a human Kd (hKd) between about 1 nM and about 10 nM and to cynomolgus serum albumin with a cynomolgus Kd (cKd) between 1 nM and 10 nM. In some embodiments, the single domain serum albumin binding protein binds to mouse serum albumin with a mouse Kd (mKd) between about 10 nM and about 50 nM.

[0336] In some embodiments, the hKd is about 1.5 nM, about 1.6 nM, about 1.7 nM, about 1.8 nM, about 1.9 nM, about 2 nM, about 2.1 nM, about 2.2 nM, about 2.3 nM, about 2.4 nM, about 2.5 nM, about 2.6 nM, about 2.7 nM, about 2.8 nM, about 2.9 nM, about 3 nM, 3.1 nM, about 3.2 nM, about 3.3. nM, about 3.4 nM, about 3.5 nM, about 3.6 nM, about 3.7 nM, about 3.8 nM, about 3.9 nM, about 4 nM, about 4.5 nM, about 5 nM, about 6, about 6.5 nM, about 7 nM, about 7.5 nM, about 8 nM, about 8.5 nM, about 9.0 nM, about 9.5 nM, or about 10 nM.

[0337] In some embodiments, the cKd is about 1.5 nM, about 1.6 nM, about 1.7 nM, about 1.8 nM, about 1.9 nM, about 2 nM, about 2.1 nM, about 2.2 nM, about 2.3 nM, about 2.4 nM, about 2.5 nM, about 2.6 nM, about 2.7 nM, about 2.8 nM, about 2.9 nM, about 3 nM, 3.1 nM, about 3.2 nM, about 3.3. nM, about 3.4 nM, about 3.5 nM, about 3.6 nM, about 3.7 nM, about 3.8 nM, about 3.9 nM, about 4 nM, about 4.5 nM, about 5 nM, about 6, about 6.5 nM, about 7 nM, about 7.5 nM, about 8 nM, about 8.5 nM, about 9.0 nM, about 9.5 nM, or about 10 nM.

[0338] In some embodiments, the mKd is about 10 nM, about 11 nM, about 12 nM, about 13 nM, about 14 nM, about 15 nM, about 16 nM, about 17 nM, about 18 nM, about 19 nM, about 20 nM, about 21 nM, about 22 nM, about 23 nM, about 24 nM, about 25 nM, about 26 nM, about 27. nM, about 28 nM, about 29 nM, about 30 nM, about 31 nM, about 32 nM, about 33 nM, about 34 nM, about 35 nM, about 36 nM, about 37, about 38 nM, about 39 nM, about 40 nM, about 41 nM, about 42 nM, about 43 nM, about 44 nM, about 45 nM, about 46 nM, about 47 nM, about 48 nM, or about 50 nM.

[0339] In some embodiments, the single domain serum albumin binding protein has an amino acid sequence selected from the group consisting of SEQ ID NOS: 3185-3193.

[0340] In some embodiments, the single domain serum albumin binding protein has the amino acid sequence set forth as SEQ ID NO: 3185, and the hKd and the cKd are between about 1 nM and about 5 nM. In some embodiments, the single domain serum albumin binding protein has the amino acid sequence set forth as SEQ ID NO: 3185, and the hKd is about 2.3 nM and the cKd is about 2.4 nM. In some embodiments, the single domain serum albumin binding protein has the amino acid sequence set forth as SEQ ID NO: 3191, and the hKd and the cKd are between about 1 nM and about 5 nM. In some embodiments, the single domain serum albumin binding protein has the amino acid sequence set forth as SEQ ID NO: 3191, and the hKd is about 2.1 nM and the cKd is about 2.2 nM. In some embodiments, the single domain serum albumin binding protein has the amino acid sequence set forth as SEQ ID NO: 3186, and the hKd and the cKd are between about 1 nM and about 5 nM. In some embodiments, the single domain serum albumin binding protein has the amino acid sequence set forth as SEQ ID NO: 3186, and the hKd is about 1.9 nM and the cKd is about 1.7 nM. In some embodiments, the single domain serum albumin binding protein has the amino acid sequence set forth as SEQ ID NO: 3187, and the hKd and the cKd are between about 1 nM and about 5 nM. In some embodiments, the single domain serum albumin binding protein has the amino acid sequence set forth as SEQ ID NO: 3187, and the hKd is about 3.2 nM and the cKd is about 3.6 nM. In some embodiments, the single domain serum albumin binding protein has the amino acid sequence set forth as SEQ ID NO: 3188, and the hKd and the cKd are between about 1 nM and about 5 nM. In some embodiments, the single domain serum albumin binding protein has the amino acid sequence set forth as SEQ ID NO: 3188, and the hKd is about 2.7 nM and the cKd is about 2.6 nM. In some embodiments, the single domain serum albumin binding protein has the amino acid sequence set forth as SEQ ID NO: 3192, and the hKd and the cKd are between about 1 nM and about 5 nM. In some embodiments, the single domain serum albumin binding protein has the amino acid sequence set forth as SEQ ID NO: 3192, and the hKd is about 2.1 nM and the cKd is about 2 nM. In some embodiments, the single domain serum albumin binding protein has the amino acid sequence set forth as SEQ ID NO: 3189, and the hKd and the cKd are between about 5 nM and about 10 nM. In some embodiments, the single domain serum albumin binding protein has the amino acid sequence set forth as SEQ ID NO: 3189, and the hKd is about 6 nM and the cKd is about 7.5 nM. In some embodiments, the single domain serum albumin binding protein has the amino acid sequence set forth as SEQ ID NO: 3190, and wherein the hKd and the cKd are between about 1 nM and about 5 nM. In some embodiments, the single domain serum albumin binding protein has the amino acid sequence set forth as SEQ ID NO: 3190, and wherein the hKd is about 2.2 nM and the cKd is about 2.3 nM. In some embodiments, the single domain serum albumin binding protein has the amino acid sequence set forth as SEQ ID NO: 3193 and wherein the hKd and the cKd are between about 1 nM and about 5 nM. In some embodiments, the single domain serum albumin binding protein has the amino acid sequence set forth as SEQ ID NO: 3193 and wherein the hKd is about 1.6 nM and the cKd is about 1.6 nM.

[0341] In some embodiments, the single domain serum albumin binding protein has the amino acid sequence set forth as SEQ ID NO: 3185 and has a mKd of about 17 nM. In some embodiments, the single domain serum albumin binding protein has the amino acid sequence set forth as SEQ ID NO: 3186 and has a mKd of about 12 nM. In some embodiments, the single domain serum albumin binding protein has the amino acid sequence set forth as SEQ ID NO: 3187 and has a mKd of about 33 nM. In some embodiments, the single domain serum albumin binding protein has the amino acid sequence set forth as SEQ ID NO: 3188 and has a mKd of about 14 nM. In some embodiments, the single domain serum albumin binding protein has the amino acid sequence set forth as SEQ ID NO: 3190 and has a mKd of about 16 nM. In some embodiments, the single domain serum albumin binding protein has the amino acid sequence set forth as SEQ ID NO: 3191 and has a mKd of about 17 nM. In some embodiments, the single domain serum albumin binding protein has the amino acid sequence set forth as SEQ ID NO: 3192 and has a mKd of about 17 nM. In some embodiments, the single domain serum albumin binding protein has the amino acid sequence set forth as SEQ ID NO: 3193 and has a mKd of about 16 nM.

[0342] In some embodiments, the ratio between the hKd and cKd (hKd: cKd) ranges from about 20:1 to about 1:2.

[0343] In some embodiments, the single domain serum albumin binding protein has an elimination half-time of at least 1 hour, at least 2 hours, at least 4 hours, at least 6 hours, at least 12 hours, at least 20 hours, at least 25 hours, at least 30 hours, at least 35 hours, at least 40 hours, at least 45 hours, at least 50 hours, or at least 100 hours.

### Immune Cell Engaging Protein Modifications

[0344] The immune cell engaging protein described herein, including antigen binding domains and immune cell engaging domains encompass derivatives or analogs in which (i) an amino acid is substituted with an amino acid residue that is not one encoded by the genetic code, (ii) the mature polypeptide is fused with another compound such as polyethylene glycol, or (iii) additional amino acids are fused to the protein, such as a leader or secretory sequence or a sequence for purification of the protein.

[0345] Typical modifications include, but are not limited to, acetylation, acylation, ADP-ribosylation, amidation, covalent attachment of flavin, covalent attachment of a heme moiety, covalent attachment of a nucleotide or nucleotide derivative, covalent attachment of a lipid or lipid derivative, covalent attachment of phosphatidylinositol, cross-linking, cyclization, disulfide bond formation, demethylation, formation of covalent crosslinks, formation of cystine, formation of pyroglutamate, formylation, gamma carboxylation, glycosylation, GPI anchor formation, hydroxylation, iodination, methylation, myristoylation, oxidation, proteolytic processing, phosphorylation, prenylation, racemization, selenoylation, sulfation, transfer-RNA mediated addition of amino acids to proteins such as arginylation, and ubiquitination.

[0346] Modifications are made anywhere in the immune cell engaging protein described herein, including the peptide backbone, the amino acid side-chains, and the amino or carboxyl termini. Certain common peptide modifications that are useful for modification of the FLT3 binding proteins include glycosylation, lipid attachment, sulfation, gamma-carboxylation of glutamic acid residues, hydroxylation, blockage of the amino or carboxyl group in a polypeptide, or both, by a covalent modification, and ADP-ribosylation.

[0347] In some embodiments, derivatives of the immune cell engaging protein as described herein comprise immunoreactive modulator derivatives and antigen binding molecules comprising one or more modifications.

[0348] In some embodiments, the immune cell engaging protein of the disclosure are monovalent or multivalent bivalent, trivalent, etc.). As used herein, the term “valency” refers to the number of potential target binding sites associated with an antibody. Each target binding site specifically binds one target molecule or specific position or locus on a target molecule. When an antibody is monovalent, each binding site of the molecule will specifically bind to a single antigen position or epitope. When an antibody comprises more than one target binding site (multivalent), each target binding site may specifically bind the same or different molecules (e.g., may bind to different ligands or different antigens, or different epitopes or positions on the same antigen).

[0349] In some embodiments, the immune cell engaging protein as set forth above are fused to an Fc region from any species, including but not limited to, human immunoglobulin, such as human IgG1, a human IgG2, a human IgG3, human IgG4, to generate Fc-fusion FLT3 binding proteins. In some embodiments, the Fc-fusion immune cell engaging protein of this disclosure have extended half-life compared to an otherwise identical immune cell engaging protein. In some embodiments, the Fc-fusion immune cell engaging protein of this disclosure contain inter alia one or more additional amino acid residue substitutions, mutations and/or modifications, e.g., in the Fc region. which result in a binding protein with preferred characteristics including, but not limited to: altered pharmacokinetics, extended serum half-life.

[0350] In some embodiments, such Fc-fused immune cell engaging protein provide extended half-lives in a mammal, such as in a human, of greater than 5 days, greater than 10 days, greater than 15 days, greater than 20 days, greater than 25 days, greater than 30 days, greater than 35 days, greater than 40 days, greater than 45 days, greater than 2 months, greater than 3 months, greater than 4 months, or greater than 5 months. The increased half-life, in some cases, results in a higher serum titer which thus reduces the frequency of the administration of the immune cell engaging protein and/or reduces the concentration of the antibodies to be administered. Binding to human FcRn in vivo and serum half-life of human FcRn high affinity binding polypeptides is assayed, in some examples, in transgenic mice or transfected human cell lines expressing human FcRn, or in primates to which the polypeptides with a variant Fc region are administered.

[0351] The immune cell engaging protein, in some cases, are differentially modified during or after production, e.g., by glycosylation, acetylation, phosphorylation, amidation, derivatization by known protecting/blocking groups, proteolytic cleavage, linkage to an antibody molecule or other cellular ligand, etc. Any of numerous chemical modifications are carried out by techniques, including but not limited, to specific chemical cleavage by cyanogen bromide, trypsin, chymotrypsin, papain, V8 protease, NaBH4, acetylation, formylation, oxidation, reduction, metabolic synthesis in the presence of tunicamycin, etc.

[0352] Various post-translational modifications of the immune cell engaging protein also encompassed by the disclosure include, for example, N-linked or O-linked carbohydrate chains, processing of N-terminal or C-terminal ends, attachment of chemical moieties to the amino acid backbone, chemical modifications of N-linked or O-linked carbohydrate chains, and addition or deletion of an N-terminal methionine residue as a result of prokaryotic host cell expression. Moreover, the FLT3 binding proteins are, in some cases, modified with a detectable label, such as an enzymatic, fluorescent, radioisotopic or affinity label to allow for detection and isolation of the modulator.

### Polynucleotides Encoding the Immune Cell Engaging Protein

[0353] Also provided, in some embodiments, are polynucleotide molecules encoding immune cell engaging protein described herein. In some embodiments, the polynucleotide molecules are provided as a DNA construct. In other embodiments, the polynucleotide molecules are provided as a messenger RNA transcript.

[0354] The polynucleotide molecules are constructed by known methods such as by combining the genes encoding the immune cell engaging protein or gene encoding various domains of the immune cell engaging protein comprising more than one domain. In some embodiments, the gene encoding the domains are either separated by peptide linkers or, in other embodiments, directly linked by a peptide bond, into a single genetic construct operably linked to a suitable promoter, and optionally a suitable transcription terminator, and expressing it in bacteria or other appropriate expression system such as, for example CHO cells. Depending on the vector system and host utilized, any number of suitable transcription and translation elements, including constitutive and inducible promoters, may be used. The promoter is selected such that it drives the expression of the polynucleotide in the respective host cell.

[0355] In some embodiments, the polynucleotide coding for an immune cell engaging protein as described herein is inserted into a vector, preferably an expression vector, which represents a further embodiment. This recombinant vector can be constructed according to known methods. Vectors of particular interest include plasmids, phagemids, phage derivatives, virii (e.g., retroviruses, adenoviruses, adeno-associated viruses, herpes viruses, lentiviruses, and the like), and cosmids.

[0356] A variety of expression vector/host systems may be utilized to contain and express the polynucleotide encoding the polypeptide of the described immune cell engaging protein. Examples of expression vectors for expression in E. coli are pSKK (Le Gall et al., J Immunol Methods. (2004) 285(1):111-27) or pcDNA5 (Invitrogen) for expression in mammalian cells.

[0357] Thus, the immune cell engaging protein as described herein, in some embodiments, are produced by introducing a vector encoding the protein as described above into a host cell and culturing said host cell under conditions whereby the protein domains are expressed, may be isolated and, optionally, further purified.

### Immunomodulators

[0358] Provided herein in some embodiments is a combination comprising an immunomodulator and an immune cell engaging protein, such as a half-life extended immune cell engaging protein. An “immunomodulatory molecule,” or an “immunomodulator,” as used interchangeably herein refers to any molecule which is capable of effecting the proliferation or activation of the cells of a subject's immune system. Such molecules include, without limitation, an immunostimulatory antibody against a co-stimulatory receptor; a modulator of an immune checkpoint molecule, prostaglandin E2 (PGE2), transforming growth factor-b (TGF-b), indoleamine 2,3-dioxygenase (IDO), nitric oxide, hepatocyte growth factor (HGF), interleukin 6 (IL-6) and interleukin 10 (IL-10). In some embodiments, modulation of immune response means increase or decrease in the level of an immune cell.

[0359] In some embodiments, the immunomodulator is an antagonist of an immune checkpoint molecule. Examples of immune checkpoint molecules, include, but are not limited to programmed cell death 1 (PDCD1, PD1, PD-1), CD274 (CD274, PDL1, PD-L1), PD-L2, cytotoxic T-lymphocyte associated protein 4 (CTLA4, CD152), CD276 (B7H3); V-set domain containing T cell activation inhibitor 1 (VTCN1, B7H4), CD272 (B and T lymphocyte associated (BTLA)), killer cell immunoglobulin like receptor, three Ig domains and long cytoplasmic tail 1 (KIR, CD158E1), lymphocyte activating 3 (LAG3, CD223), hepatitis A virus cellular receptor 2 (HAVCR2, TIMD3, TIM3), V-set immunoregulatory receptor (VSIR, B7H5, VISTA), T cell immunoreceptor with Ig and ITIM domains (TIGIT), programmed cell death 1 ligand 2 (PDCD1LG2, PD-L2, CD273), immunoglobulin superfamily member 11 (IGSF11, VSIG3), TNFRSF14 (HVEM, CD270), TNFSFI4 (HVEML), PVR related immunoglobulin domain containing (PVRIG, CD112R), galectin 9 (LGALS9), killer cell immunoglobulin like receptor, two Ig domains and long cytoplasmic tail 1 (KIR2DL1); killer cell immunoglobulin like receptor, two Ig domains and long cytoplasmic tail 2 (KIR2DL2); killer cell immunoglobulin like receptor, two Ig domains and long cytoplasmic tail 3 (KIR2DL3); and killer cell immunoglobulin like receptor, three Ig domains and long cytoplasmic tail 1 (KIR3DL1), killer cell lectin like receptor C1 (KLRC1, NKG2A, CD159A), killer cell lectin like receptor D1 (KLRD1, CD94), killer cell lectin like receptor G1 (KLRG1, CLEC15A, MAFA, 2F1), sialic acid binding Ig like lectin 7 (SIGLEC7), or sialic acid binding Ig like lectin 9 (SIGLEC9), CEACAM (e.g., CEACAM-1, CEACAM-3 and/or CEACAM-5), VISTA, LAIR1, CD160, 2B4, CD80, CD86, B7-H1, B7-H3 (CD276), B7-H4 (VTCN1), HVEM (TNFRSF14 or CD270), KIR, A2AR, A2BR, MHC class I, MHC class II, GAL9, adenosine, TGFR (e.g., TGFR beta), CD94/NKG2A, Siglec, IDO, TDO, CD39, CD73, GARP, CD47, PVRIG, CSF1R, and NOX. In certain embodiments, the immunomodulator is an inhibitor or antagonist of an immune checkpoint molecule (e.g., an inhibitor of PD-1, PD-L1, LAG-3, TIM-3, CEACAM (e.g., CEACAM-1, -3 and/or -5) or CTLA-4, or any combination thereof).

[0360] The term “immune checkpoint” refers to a group of molecules on the cell surface of CD4 and CD8 T cells. These molecules can effectively serve as “brakes” to down-modulate or inhibit an anti-tumor immune response. Inhibition of an inhibitory molecule can be performed by inhibition at the DNA, RNA or protein level. In some embodiments, an inhibitory nucleic acid (e.g., a dsRNA, siRNA or shRNA), is used to inhibit expression of an inhibitory molecule. In some embodiments, the inhibitor of an inhibitory signal is, a polypeptide e.g., a soluble ligand, or an antibody or antigen-binding fragment thereof, that binds to the inhibitory molecule.

[0361] PD-1

[0362] Immune checkpoint molecules useful in the methods and compositions of this disclosure, in some embodiments, includes, Programmed Death 1 (PD-1). PD-1 is a key immune checkpoint receptor expressed by activated T and B cells and mediates immunosuppression. PD-1 is a member of the CD28 family of receptors, which includes CD28, CTLA-4, ICOS, PD-1, and BTLA. Two cell surface glycoprotein ligands for PD-1 have been identified, Programmed Death Ligand-1 (PD-L1) and Programmed Death Ligand-2 (PD-L2), that are expressed on antigen-presenting cells as well as many human cancers and have been shown to down regulate T cell activation and cytokine secretion upon binding to PD-1. Inhibition of the PD-1/PD-L1 interaction mediates potent antitumor activity in preclinical models.

[0363] “Programmed Death-1 (PD-1)” refers to an immunoinhibitory receptor belonging to the CD28 family. PD-1 is expressed predominantly on previously activated T cells in vivo, and binds to two ligands, PD-L1 and PD-L2. The term “PD-1” as used herein includes human PD-1 (hPD-1), variants, isoforms, and species homologs of hPD-1, and analogs having at least one common epitope with hPD-1. The complete hPD-1 sequence can be found under GenBank Accession No. U64863. “PD-1” and “PD-1 receptor” are used interchangeably herein.

[0364] In some embodiments, the immunomodulator is an immune checkpoint modulator, e.g., an anti-PD-1 antibody selected from the group consisting of Pembrolizumab (humanized antibody), Pidilizumab (CT-011, monoclonal antibody, binds DLL1 and PD-1), Spartalizumab (PDR001, monoclonal antibody), Nivolumab (BMS-936558, MDX-1106, human IgG4 monoclonal antibody), MEDI0680 (AMP-514, monoclonal antibody), Cemiplimab (REGN2810, monoclonal antibody), Dostarlimab (TSR-042, monoclonal antibody), Sasanlimab (PF-06801591, monoclonal antibody), Tislelizumab (BGB-A317, monoclonal antibody), BGB-108 (antibody), Tislelizumab (BGB-A317, antibody), Camrelizumab (INCSHR1210, SHR-1210), AMP-224, Zimberelimab (AB122, GLS-010, WBP-3055, monoclonal antibody), AK-103 (HX-008, monoclonal antibody), AK-105 (anti-PD-1 antibody), CS1003 (monoclonal antibody), HLX10 (monoclonal antibody), Retifanlimab (MGA-012, anti-PD-1 monoclonal antibody), BI-754091 (antibody), Balstilimab (AGEN2034, PD-1 antibody), toripalimab (JS-001, antibody), cetrelimab (JNJ-63723283, anti-PD-1 antibody), genolimzumab (CBT-501, anti-PD-1 antibody), LZM009 (anti-PD-1 monoclonal antibody), Prolgolimab (BCD-100, anti-PD-1 monoclonal antibody), Sym021 (antibody), ABBV-181 (antibody), BAT-1306 (antibody), JTX-4014, sintilimab (IBI-308), Tebotelimab (MGD013, PD-1/LAG-3 bispecific), MGD-019 (PD-1/CTLA4 bispecific antibody), KN-046 (PD-1/CTLA4 bispecific antibody), MEDI-5752 (CTLA4/PD-1 bispecific antibody), RO7121661 (PD-1/TIM-3 bispecific antibody), XmAb20717 (PD-1/CTLA4 bispecific antibody), and AK-104 (CTLA4/PD-1 bispecific antibody).

[0365] Antibodies that bind specifically to PD-1 with high affinity have been disclosed in U.S. Pat. Nos. 8,008,449 and 8,779,105. Other anti-PD-1 antibodies have been described in, for example, U.S. Pat. Nos. 6,808,710, 7,488,802, 8,168,757 and 8,354,509, and PCT Publication No. WO 2012/145493. The antibodies disclosed in U.S. Pat. No. 8,008,449 have been demonstrated to exhibit one or more of the following characteristics: (a) binds to human PD-1 with a KD of 1×10-7 M or less, as determined by surface plasmon resonance using a Biacore biosensor system; (b) does not substantially bind to human CD28, CTLA-4 or ICOS; (c) increases T-cell proliferation in a Mixed Lymphocyte Reaction (MLR) assay; (d) increases interferon-γ production in an MLR assay; (e) increases IL-2 secretion in an MLR assay; (f) binds to human PD-1 and cynomolgus monkey PD-1; (g) inhibits the binding of PD-L1 and/or PD-L2 to PD-1; (h) stimulates antigen-specific memory responses; (i) stimulates Ab responses; and (j) inhibits tumor cell growth in vivo. Anti-PD-1 antibodies useful for the present combination include antibodies that bind specifically to human PD-1 and exhibit at least one of the preceding characteristics.

[0366] In some embodiments, the anti-PD-1 antibody or an antigen binding fragment thereof is Nivolumab (CAS Registry Number: 946414-94-4). Alternative names for Nivolumab include OPDIVO®; formerly designated as 5C4, MDX-1106, MDX-1106-04, ONO-4538, or BMS-936558. Nivolumab is a fully human IgG4 monoclonal antibody which specifically blocks PD-1. Nivolumab (clone 5C4) and other human monoclonal antibodies that specifically bind to PD-1 are disclosed in U.S. Pat. No. 8,008,449 and WO2006/121168. Nivolumab is a PD-1 immune checkpoint inhibitor antibody that selectively prevents interaction with PD-1 ligands (PD-L1 and PD-L2), thereby blocking the down-regulation of antitumor T-cell functions (U.S. Pat. No. 8,008,449; Wang et al., 2014 Cancer Immunol Res. 2(9):846-56). In another embodiment, the anti-PD-1 antibody or fragment thereof cross-competes with Nivolumab. In other embodiments, the anti-PD-1 antibody or fragment thereof binds to the same epitope as Nivolumab. In certain embodiments, the anti-PD-1 antibody has the same CDRs as Nivolumab. In one embodiment, the anti-PD-1 antibody or an antigen binding fragment thereof is Nivolumab, and having a sequence disclosed herein (or a sequence at least 80%, 85%, 90%, 95% identical or higher to the sequence specified).

[0367] In some embodiments, the Nivolumab comprises a heavy chain comprising the sequence of SEQ ID NO: 3463 and a light chain comprising the sequence of SEQ ID NO: 3464.

[0368] In some embodiments, the anti-PD-1 antibody or an antigen binding fragment thereof is Pembrolizumab. Pembrolizumab (also referred to as Lambrolizumab, MK-3475, MK03475, SCH-900475 or KEYTRUDA®; Merck) is a humanized IgG4 monoclonal antibody that binds to PD-1. Pembrolizumab and other humanized anti-PD-1 antibodies are disclosed in Hamid, O. et al. (2013) New England Journal of Medicine 369 (2): 134-44, U.S. Pat. Nos. 8,354,509 and 8,900,587 and WO2009/114335. In one embodiment, the anti-PD-1 antibody or an antigen binding fragment thereof is Pembrolizumab disclosed in, e.g., U.S. Pat. Nos. 8,354,509 and 8,900,587 and WO 2009/114335, and having a sequence disclosed herein (or a sequence at least 80%, 85%, 90%, 95% identical or higher to the sequence specified). In some embodiments, the Pembrolizumab comprises a heavy chain comprising the sequence of SEQ ID NO: 3465 and a light chain comprising the sequence of SEQ ID NO: 3466.

[0369] In another embodiment, the anti-PD-1 antibody or fragment thereof cross-competes with Pembrolizumab. In some embodiments, the anti-PD-1 antibody or fragment thereof binds to the same epitope as Pembrolizumab. In certain embodiments, the anti-PD-1 antibody has the same CDRs as Pembrolizumab. In another embodiment, the anti-PD-1 antibody is Pembrolizumab.

[0370] In other embodiments, the anti-PD-1 antibody or fragment thereof cross-competes with MEDI0608. In still other embodiments, the anti-PD-1 antibody or fragment thereof binds to the same epitope as MEDI0608. In certain embodiments, the anti-PD-1 antibody has the same CDRs as MEDI0608. In other embodiments, the anti-PD-1 antibody is MEDI0608 (formerly AMP-514), which is a monoclonal antibody. MEDI0608 is described, for example, in U.S. Pat. No. 8,609,089B2.

[0371] In certain embodiments, the immunomodulator is an anti-PD-1 antagonist. One example of the anti-PD-1 antagonist is AMP-224, which is a B7-DC Fc fusion protein. AMP-224 is discussed in U.S. Publ. No. 2013/0017199.

[0372] In other embodiments, the anti-PD-1 antibody or fragment thereof cross-competes with BGB-A317. In some embodiments, the anti-PD-1 antibody or fragment thereof binds the same epitope as BGB-A317. In certain embodiments, the anti-PD-1 antibody has the same CDRs as BGB-A317. In certain embodiments, the anti-PD-1 antibody is BGB-A317, which is a humanized monoclonal antibody. BGB-A317 is described in U.S. Publ. No. 2015/0079109.

[0373] Anti-PD-1 antibodies useful for the disclosed combinations also include isolated antibodies that bind specifically to human PD-1 and cross-compete for binding to human PD-1 with Nivolumab (see, e.g., U.S. Pat. Nos. 8,008,449 and 8,779,105; WO 2013/173223). The ability of antibodies to cross-compete for binding to an antigen indicates that these antibodies bind to the same epitope region of the antigen and sterically hinder the binding of other cross-competing antibodies to that particular epitope region. These cross-competing antibodies are expected to have functional properties very similar to those of Nivolumab by virtue of their binding to the same epitope region of PD-1. Cross-competing antibodies can be readily identified based on their ability to cross-compete with nivolumab in standard PD-1 binding assays such as Biacore analysis, ELISA assays or flow cytometry (see, e.g., WO 2013/173223).

[0374] In certain embodiments, the antibodies that cross-compete for binding to human PD-1 with, or bind to the same epitope region of human PD-1 as, Nivolumab are mAbs. For administration to human subjects, these cross-competing antibodies can be chimeric antibodies, or humanized or human antibodies. Such chimeric, humanized or human mAbs can be prepared and isolated by methods well known in the art.

[0375] Anti-PD-1 antibodies useful for the present disclosure also include antigen-binding portions of the above antibodies. Non-limiting examples of binding fragments encompassed within the term “antigen-binding portion” of an antibody include (i) a Fab fragment, a monovalent fragment consisting of the VL, VH, CL and CH1 domains; (ii) a F(ab′)2 fragment, a bivalent fragment comprising two Fab fragments linked by a disulfide bridge at the hinge region; (iii) a Fd fragment consisting of the VH and CH1 domains; and (iv) a Fv fragment consisting of the VL and VH domains of a single arm of an antibody.

[0376] Anti-PD-1 antibodies suitable for use in the disclosed compositions are antibodies that bind to PD-1 with high specificity and affinity, block the binding of PD-L1 and or PD-L2, and inhibit the immunosuppressive effect of the PD-1 signaling pathway. In any of the compositions or methods disclosed herein, an anti-PD-1 “antibody” includes an antigen-binding portion or fragment that binds to the PD-1 receptor and exhibits the functional properties similar to those of whole antibodies in inhibiting ligand binding and upregulating the immune system. In certain embodiments, the anti-PD-1 antibody or antigen-binding portion thereof cross-competes with nivolumab for binding to human PD-1. In other embodiments, the anti-PD-1 antibody or antigen-binding portion thereof is a chimeric, humanized or human monoclonal antibody or a portion thereof. In certain embodiments, the antibody is a humanized antibody. In other embodiments, the antibody is a human antibody. Antibodies of an IgG1, IgG2, IgG3 or IgG4 isotype can be used.

[0377] In certain embodiments, the anti-PD-1 antibody or antigen-binding portion thereof comprises a heavy chain constant region which is of a human IgG1 or IgG4 isotype. In certain other embodiments, the sequence of the IgG4 heavy chain constant region of the anti-PD-1 antibody or antigen-binding portion thereof contains an S228P mutation which replaces a serine residue in the hinge region with the proline residue normally found at the corresponding position in IgG1 isotype antibodies. This mutation, which is present in Nivolumab, prevents Fab arm exchange with endogenous IgG4 antibodies, while retaining the low affinity for activating Fc receptors associated with wild-type IgG4 antibodies (Wang et al., 2014). In yet other embodiments, the antibody comprises a light chain constant region which is a human kappa or lambda constant region. In other embodiments, the anti-PD-1 antibody or antigen-binding portion thereof is a monoclonal antibody (mAb) or an antigen-binding portion thereof. In certain embodiments of any of the therapeutic methods described herein comprising administration of an anti-PD-1 antibody, the anti-PD-1 antibody is Nivolumab. In other embodiments, the anti-PD-1 antibody is Pembrolizumab. In other embodiments, the anti-PD-1 antibody is chosen from the human antibodies 17D8, 2D3, 4H1, 4A11, 7D3 and 5F4 described in U.S. Pat. No. 8,008,449. In still other embodiments, the anti-PD-1 antibody is MEDI0608 (formerly AMP-514), AMP-224, or Pidilizumab (CT-011).

[0378] In some embodiments, the anti-PD-1 antibody or antigen binding fragment thereof is Pidilizumab. Pidilizumab (CT-011; Cure Tech) is a humanized IgG1k monoclonal antibody that binds to PD-1. Pidilizumab and other humanized anti-PD-1 monoclonal antibodies are disclosed in WO2009/101611.

[0379] Other anti-PD-1 antibodies include, e.g., anti-PD-1 antibodies disclosed in U.S. Pat. No. 8,609,089, US 2010028330 A1, and/or US 20120114649 A1. In some embodiments, the PD-L1 inhibitor is an antibody molecule. In some embodiments, the anti-PD-L1 inhibitor is chosen from

### PD-L1 and PD-L2

[0380] “Programmed Death Ligand-1 (PD-L1)” is one of two cell surface glycoprotein ligands for PD-1 (the other being PD-L2) that down-regulate T cell activation and cytokine secretion upon binding to PD-1. The term “PD-L1” as used herein includes human PD-L1 (hPD-L1), variants, isoforms, and species homologs of hPD-L1, and analogs having at least one common epitope with hPD-L1. The complete hPD-L1 sequence can be found under GenBank Accession No. Q9NZQ7.

[0381] In some embodiments, the immunomodulator is an antagonist of PD-L1, which is an anti-PD-L1 antibody. In some embodiments, the anti-PD-L1 antibody is YW243.55.570, MPDL3280A, MEDI-4736, MSB-0010718C, or MDX-1105.

[0382] In some embodiments, the immunomodulator is an immune checkpoint modulator, e.g., an anti-PD-1 antibody selected from the group consisting of Atezolizumab (MPDL3280A, monoclonal antibody; SEQ ID NOS: 3523 and 3524 provide heavy and light sequences for Atezolizumab, TECENTRIQ®, Genentech Inc.), Avelumab (MSB0010718C, monoclonal antibody), Durvalumab (MEDI-4736, human immunoglobulin G1 kappa (IgG1κ) monoclonal antibody), Envafolimab (KN035, single-domain PD-L1 antibody), AUNP12, CA-170 (small molecule targeting PD-L1 and VISTA), BMS-986189 (macrocyclic peptide), BMS-936559 (Anti-PD-L1 antibody), Cosibelimab (CK-301, monoclonal antibody), LY3300054 (antibody), CX-072 (antibody), CBT-502 (antibody), MSB-2311 (antibody), BGB-A333 (antibody), SHR-1316 (antibody), CS1001 (WBP3155, antibody), HLX-20 (antibody), KL-A167 (HBM 9167, antibody), STI-A1014 (antibody), STI-A1015 (IMC-001, antibody), BCD-135 (monoclonal antibody), FAZ-053 (antibody), CBT-502 (TQB2450, antibody), MDX1105-01 (antibody), FS-118 (LAG-3/PD-L1, bispecific antibody), M7824 (anti-PD-L1/TGF-0 receptor II fusion protein), CDX-527 (CD27/PD-L1 bispecific antibody), LY3415244 (TIM3/PD-L1 bispecific antibody), and INBRX-105 (4-1BB/PD-L1 bispecific antibody).

[0383] In some embodiments, the anti-PD-L1 antibody is MSB0010718C. MSB0010718C (also referred to as A09-246-2; Merck Serono) is a monoclonal antibody that binds to PD-L1. Additional anti-PD-L1 antibodies are disclosed in WO2013/079174, and having a sequence disclosed herein (or a sequence at least 80%, 85%, 90%, 95% identical or higher to the sequence specified). In some embodiments, the MSB0010718C comprises a heavy chain comprising the sequence of SEQ ID NO: 3467 or SEQ ID NO: 3469, and a light chain comprising the sequence of SEQ ID NO: 3468 or SEQ ID NO: 3470.

[0384] In one embodiment, the anti-PD-L1 antibody is YW243.55.570. The YW243.55.570 antibody is an anti-PD-L1 described in WO 2010/077634 (heavy and light chain variable region sequences shown in SEQ ID NOS: 3471 and 3472), and having a sequence disclosed therein (or a sequence substantially identical or similar thereto, e.g., a sequence at least 85%, 90%, 95% identical or higher to the sequence specified).

[0385] In one embodiment, the PD-L1 antibody is MDX-1105. MDX-1105, also known as BMS-936559, is an anti-PD-L1 antibody described in WO2007/005874, and having a sequence disclosed therein (or a sequence at least 80%, 85%, 90%, 95% identical or higher to the sequence specified).

[0386] In one embodiment, the PD-L1 antibody is MDPL3280A (Genentech/Roche). MDPL3280A is a human Fc optimized IgG1 monoclonal antibody that binds to PD-L1. MDPL3280A and other human monoclonal antibodies to PD-L1 are disclosed in U.S. Pat. No. 7,943,743 and U.S Publication No. 20120039906.

[0387] In some embodiments, the PD-L2 antagonist is AMP-224. AMP-224 is a PD-L2 Fc fusion soluble receptor that blocks the interaction between PD-1 and B7-H1 (B7-DCIg; Amplimmune; e.g., disclosed in WO2010/027827 and WO2011/066342).

[0388] TIM-3

[0389] The protein T cell immunoglobulin and mucin domain-3 (TIM-3) is a type I membrane protein in the immunoglobulin (Ig) superfamily. It has an extracellular Ig variable-like (IgV) domain, an extracellular mucin-like domain, and a cytoplasmic domain with six conserved tyrosine residues (Monney et al. (2002) Nature 415:536-41). TIM-3 is expressed on activated T-helper type 1 (Thl) and CD8+T (Tci) lymphocytes, some macrophages (Monney et al. (2002) Nature 415:536-41), activated natural killer (NK) cells (Ndhlovu et al. (2012) Blood 119(16):3734-43), and IL-17-producing Thi7 cells (Nakae et al. (2007) J Leukoc Biol 81: 1258-68). Studies have shown that TIM-3 functions to inhibit T cell, myeloid cell, and NK cell-mediated responses and to promote immunological tolerance. TIM-3 expression is upregulated in CD8+ T cells in cancer patients. The term TIM-3 as used herein includes human TIM-3 (hTIM-3), variants, isoforms, and species homologs of hTIM-3, and analogs having at least one common epitope with hTIM-3. The term “human TIM-3” refers to human sequence TIM-3, such as the complete amino acid sequence of human LAG-3 having UniProt Accession No. Q8TDQ0.3.

[0390] In one embodiment, a combination described herein includes a TIM-3 antibody or an antigen binding fragment thereof. In some embodiments, the combination is used to treat a cancer, e.g., a cancer described herein, e.g, a solid tumor or a hematologic malignancy. Exemplary anti-TIM-3 antibodies are disclosed in U.S. Pat. No. 8,552,156, WO 2011/155607, EP 2581113 and U.S Publication No. 2014/044728. Additional antibodies targeting TIM-3 include, but are not limited to, F38-2E2 (BioLegend), cobolimab (TSR-022; Tesaro), LY3321367 (Eli Lilly), MBG453 (Novartis) and antibodies as disclosed in, e.g., WO 2013/006490, WO 2018/085469. (e.g., antibodies comprising heavy and light chain sequences encoded by nucleic acid sequences according to SEQ ID NOS: 3510 and 3511), WO 2018/106588, WO 2018/106529 (e.g., an antibody comprising heavy and light chain sequences according to SEQ ID NOS: 3513-3514).

[0391] In another embodiment, an anti-TIM-3 antibody useful for the combination binds to the same epitope as an anti-TIM3 antibody described herein. In other embodiments, an anti-TIM-3 antibody comprises six CDRs of an anti-TIM-3 antibody as described herein.

[0392] In certain embodiments, the immunomodulator is a TIM-3 ligand inhibitor. TIM-3 ligand inhibitors include, without limitation, CEACAMI inhibitors such as the anti-CEACAMI antibody CM10 (cCAM Biotherapeutics; see WO 2013/054331), antibodies disclosed in WO 2015/075725 (e.g., CM-24, 26H7, 5F4, TEG-11, 12-140-4, 4/3/17, COL-4, F36-54, 34B1, YG-C28F2, D14HD11, M8.7.7, D11-AD11, HEA81, B 1. 1, CLB-gran-10, F34-187, T84.1, B6.2, B 1.13, YG-C94G7, 12-140-5, scFv DIATHIS1, TET-2; cCAM Biotherapeutics), antibodies described by Watt et al., 2001 (Blood, 98: 1469-1479) and in WO 2010/12557 and Phosphatidylserine inhibitors such as bavituximab (Peregrine).

### LAG-3

[0393] The term “LAG3”, “LAG-3” or “Lymphocyte Activation Gene-3” refers to Lymphocyte Activation Gene-3. The term LAG-3 as used herein includes human LAG-3 (hLAG-3), variants, isoforms, and species homologs of hLAG-3, and analogs having at least one common epitope with hLAG-3. The term “human LAG-3” refers to human sequence LAG-3, such as the complete amino acid sequence of human LAG-3 having GenBank Accession No. NP 002277. The term “mouse LAG-3” refers to mouse sequence LAG-3, such as the complete amino acid sequence of mouse LAG-3 having GenBank Accession No. NP_032505. LAG-3 is also known in the art as, for example, CD223. The human LAG-3 sequence may differ from human LAG-3 of GenBank Accession No. NP_002277 by having, e.g., conserved mutations or mutations in non-conserved regions and the LAG-3 has substantially the same biological function as the human LAG-3 of GenBank Accession No. NP_002277. For example, a biological function of human LAG-3 is having an epitope in the extracellular domain of LAG-3 that is specifically bound by an antibody of the instant disclosure or a biological function of human LAG-3 is binding to MEW Class II molecules.

[0394] In one embodiment, a combination described herein includes a LAG-3 antibody or an antigen binding fragment thereof. In some embodiments, the combination is used to treat a cancer, e.g., a cancer described herein, e.g, a solid tumor or a hematologic malignancy. In some embodiments, the anti-LAG-3 antibody is BMS-986016. BMS-986016 (also referred to as BMS986016; Bristol-Myers Squibb) is a monoclonal antibody that binds to LAG-3. BMS-986016 and other humanized anti-LAG-3 antibodies are disclosed in US 2011/0150892, WO2010/019570, and WO2014/008218. Additional anti-LAG-3 antibodies have been disclosed in Int'l Publ. No. WO/2015/042246 and U.S. Publ. Nos. 2014/0093511 and 2011/0150892. An exemplary LAG-3 antibodies useful for the present combination is 25F7 (described in U.S. Publ. No. 2011/0150892). In another embodiment, an anti-LAG-3 antibody useful for the combination binds to the same epitope as 25F7 or BMS-986016. In other embodiments, an anti-LAG-3 antibody comprises six CDRs of 25F7 or BMS-986016.

[0395] CTLA-4 Antibodies

[0396] “Cytotoxic T-Lymphocyte Antigen-4” (CTLA-4) refers to an immunoinhibitory receptor belonging to the CD28 family. CTLA-4 is expressed exclusively on T cells in vivo, and binds to two ligands, CD80 and CD86 (also called B7-1 and B7-2, respectively). The term “CTLA-4” as used herein includes human CTLA-4 (hCTLA-4), variants, isoforms, and species homologs of hCTLA-4, and analogs having at least one common epitope with hCTLA-4. The complete hCTLA-4 sequence can be found under GenBank Accession No. AAB59385.

[0397] In one embodiment, a combination described herein includes a CTLA-4 antibody or an antigen binding fragment thereof. In some embodiments, the combination is used to treat a cancer, e.g., a cancer described herein, e.g, a solid tumor or a hematologic malignancy.

[0398] Exemplary anti-CTLA-4 antibodies include Tremelimumab (IgG2 monoclonal antibody available from Pfizer, formerly known as ticilimumab, CP-675,206); and Ipilimumab (CTLA-4 antibody, also known as MDX-010, CAS No. 477202-00-9). Other exemplary anti-CTLA-4 antibodies are disclosed, e.g., in U.S. Pat. No. 5,811,097. In one embodiment, the CTLA4 inhibitor or antagonist of is a soluble ligand (e.g., a CTLA-4-Ig). Additional antibodies that bind specifically to CTLA-4 with high affinity have been disclosed in U.S. Pat. Nos. 6,984,720 and 7,605,238. Other anti-CTLA-4 mAbs have been described in, for example, U.S. Pat. Nos. 5,977,318, 6,051,227, 6,682,736, and 7,034,121. An exemplary clinical anti-CTLA-4 antibody is the human mAb 10D1 (now known as ipilimumab and marketed as YERVOY®) as disclosed in U.S. Pat. No. 6,984,720. Ipilimumab is an anti-CTLA-4 antibody for use in the methods disclosed herein. Ipilimumab is a fully human, IgG1 monoclonal antibody that blocks the binding of CTLA-4 to its B7 ligands, thereby stimulating T cell activation and improving overall survival (OS) in patients with advanced melanoma. Another anti-CTLA-4 antibody useful for the present combination is tremelimumab (also known as CP-675,206). Tremelimumab is human IgG2 monoclonal anti-CTLA-4 antibody. Tremelimumab is described in WO/2012/122444, U.S. Publ. No. 2012/263677, or WO Publ. No. 2007/113648 A2.

[0399] Anti-CTLA-4 antibodies useful for the disclosed combination also include isolated antibodies that bind specifically to human CTLA-4 and cross-compete for binding to human CTLA-4 with ipilimumab or tremelimumab or bind to the same epitope region of human CTLA-4 as ipilimumab or tremelimumab.

[0400] CD137/4-1BB

[0401] “CD137,” “CD-137,” “tumor necrosis factor receptor superfamily member 9 (TNFRSF9),” “4-1BB” and “induced by lymphocyte activation (ILA)” all refer to the same member of the tumor necrosis factor receptor family. One activity CD137 has been implicated in is costimulatory activity for activated T cells. (Jang et al. (1998) Biochem. Biophys. Res. Commun. 242 (3): 613-20). The term “CD137” as used herein includes human CD137 (h4-1BB), variants, isoforms, and species homologs of hCD137, and analogs having at least one common epitope with hCD137. The amino acid sequence for hCD137 can be found under GenBank Accession No. NP_001552.

[0402] In one embodiment, a combination described herein includes a CD137 antibody or an antigen binding fragment thereof. Anti-CD137 antibodies specifically bind to and activate CD137-expressing immune cells, stimulating an immune response, in particular a cytotoxic T cell response, against tumor cells. Antibodies that bind to CD137 have been disclosed in U.S. Publ. No. 2005/0095244 and U.S. Pat. Nos. 7,288,638, 6,887,673, 7,214,493, 6,303,121, 6,569,997, 6,905,685, 6,355,476, 6,362,325, 6,974,863, and 6,210,669. In some embodiments, the anti-CD137 antibody is urelumab (BMS-663513), described in U.S. Pat. No. 7,288,638 (20H4.9-IgG4 [1007 or BMS-663513]). In some embodiments, the anti-CD137 antibody is BMS-663031 (20H4.9-IgG1), described in U.S. Pat. No. 7,288,638. In some embodiments, the anti-CD137 antibody is 4E9 or BMS-554271, described in U.S. Pat. No. 6,887,673. In some embodiments, the anti-CD137 antibody is an antibody disclosed in U.S. Pat. Nos. 7,214,493; 6,303,121; 6,569,997; 6,905,685; or 6,355,476. In some embodiments, the anti-CD137 antibody is 1D8 or BMS-469492; 3H3 or BMS-469497; or 3E1, described in U.S. Pat. No. 6,362,325. In some embodiments, the anti-CD137 antibody is an antibody disclosed in U.S. Pat. No. 6,974,863 (such as 53A2). In some embodiments, the anti-CD137 antibody is an antibody disclosed in U.S. Pat. No. 6,210,669 (such as 1D8, 3B8, or 3E1). In some embodiments, the antibody is Pfizer's PF-05082566 (PF-2566). In other embodiments, an anti-CD137 antibody useful for the combination of this disclosure cross-competes with the anti-CD137 antibodies disclosed herein. In some embodiments, an anti-CD137 antibody binds to the same epitope as the anti-CD137 antibody disclosed herein. In other embodiments, an anti-CD137 antibody useful for the combination of this disclosure comprises six CDRs of the anti-CD137 antibodies disclosed herein.

[0403] KIR

[0404] The terms “Killer Ig-like Receptor,” “Killer Inhibitory Receptor”, or “KIR”, refers to a protein or polypeptide encoded by a gene that is a member of the KIR gene family or by a cDNA prepared from such a gene. The term KIR as used herein includes human KIR (hKIR), variants, isoforms, and species homologs of hKIR, and analogs having at least one common epitope with hKIR. The sequences of human KIR genes and cDNAs, as well as their protein products, are available in public databases, including GenBank. Non-limiting exemplary GenBank entries of human KIRs have the following accession numbers: KIR2DL1: GenBank accession number U24076, NM 014218, AAR16197, or L41267; KIR2DL2: GenBank accession number U24075 or L76669; KIR2DL3: GenBank accession number U24074 or L41268; KIR2DL4: GenBank accession number X97229; KIR2DS1: GenBank accession number X89892; KIR2DS2: GenBank accession number L76667; KIR2DS3: GenBank accession number NM_012312 or L76670 (splice variant); KIR3DL1: GenBank accession number L41269; and KIR2DS4: GenBank accession number AAR26325. A KIR may comprise from 1 to 3 extracellular domains, and may have a long (e.g., more than 40 amino acids) or short (e.g., less than 40 amino acids) cytoplasmic tail.

[0405] In one embodiment, a combination described herein includes an anti-KIR antibody or an antigen binding fragment thereof. Antibodies that bind specifically to KIR block interaction between Killer-cell immunoglobulin-like receptors (KIR) on NK cells with their ligands. Blocking these receptors facilitates activation of NK cells and, potentially, destruction of tumor cells by the latter. Examples of anti-KIR antibodies have been disclosed in Int'l Publ. Nos. WO/2014/055648, WO 2005/003168, WO 2005/009465, WO 2006/072625, WO 2006/072626, WO 2007/042573, WO 2008/084106, WO 2010/065939, WO 2012/071411 and WO/2012/160448. One anti-KIR antibody useful for the combination of this disclosure is lirilumab (also referred to as BMS-986015, IPH2102, or the S241P variant of 1-7F9), first described in Int'l Publ. No. WO 2008/084106. An additional anti-KIR antibody useful for the combination of this disclosure is 1-7F9 (also referred to as IPH2101), described in Int'l Publ. No. WO 2006/003179. In one embodiment, an anti-KIR antibody for the present combination cross competes for binding to KIR with lirilumab or I-7F9. In another embodiment, an anti-KIR antibody for the present combination binds to the same epitope as lirilumab or I-7F9. In other embodiments, an anti-KIR antibody comprises six CDRs of lirilumab or I-7F9.

[0406] GITR

[0407] GITR is a member of the tumor necrosis factor receptor super family. The term “GITR”, “tumor necrosis factor receptor superfamily member 18”, “activation-inducible TNFR family receptor” or “glucocorticoid-induced TNFR-related protein” all refer to a protein that is a member of the tumor necrosis factor receptor super family. GITR is encoded for by the TNFRSF18 gene in humans. It is a 241 amino acid type I transmembrane protein characterized by three cysteine pseudo-repeats in the extracellular domain and specifically protects T-cell receptor-induced apoptosis. Three isoforms of hGITR have been identified, all of which share the same extracellular domain, except for its C-terminal portion. Variant 1 (Accession No. NP_004186) consists of 241 amino acids and represents the longest transcript. It contains an extra coding segment that leads to a frame shift, compared to variant 2. The resulting protein (isoform 1) contains a distinct and shorter C-terminus, as compared to isoform 2. Variant 2 (Accession No. NP_683699) encodes the longest protein (isoform 2), consisting of 255 amino acids, and is soluble. Variant 3 (Accession No. NP_683700) contains an extra coding segment that leads to a frame shift, compared to variant 2. The resulting protein (isoform 3) contains a distinct and shorter C-terminus, as compared to isoform 2, and consists of 234 amino acids.

[0408] In one embodiment, a combination described herein includes an anti-GITR antibody or an antigen binding fragment thereof. Anti-GITR antibodies for combining with an anti-PD-1 antibody in a fixed dose may be any anti-GITR antibody that binds specifically to human GITR target and activate the glucocorticoid-induced tumor necrosis factor receptor (GITR). GITR is a member of the TNF receptor superfamily that is expressed on the surface of multiple types of immune cells, including regulatory T cells, effector T cells, B cells, natural killer (NK) cells, and activated dendritic cells (“anti-GITR agonist antibodies”). Specifically, GITR activation increases the proliferation and function of effector T cells, as well as abrogating the suppression induced by activated T regulatory cells. In addition, GITR stimulation promotes anti-tumor immunity by increasing the activity of other immune cells such as NK cells, antigen presenting cells, and B cells. Examples of anti-GITR antibodies have been disclosed in Int'l Publ. Nos. WO/2015/031667, WO2015/184,099, WO2015/026,684, WO11/028683 and WO/2006/105021, U.S. Pat. Nos. 7,812,135 and 8,388,967 and U.S. Publ. Nos. 2009/0136494, 2014/0220002, 2013/0183321 and 2014/0348841.

[0409] In one embodiment, an anti-GITR antibody useful for the present combination is TRX518 (described in, for example, Schaer et al. Curr Opin Immunol. (2012) April; 24(2): 217-224, and WO/2006/105021). In another embodiment, an anti-GITR antibody useful for the present combination is MK4166 or MK1248 and antibodies described in WO11/028683 and in U.S. Pat. No. 8,709,424, and comprising, e.g, a VH chain comprising SEQ ID NO: 3483 and a VL chain comprising SEQ ID NO: 3484). In certain embodiments, an anti-GITR antibody is an anti-GITR antibody that is disclosed in WO2015/031667, e.g., an antibody comprising VH CDRs 1-3 comprising SEQ ID NOS: 3485, 3486 and 3487 of WO2015/031667, respectively, and VL CDRs 1-3 comprising SEQ ID NOS: 3488, 3489 and 3490 of WO2015/031667. In certain embodiments, an anti-GITR antibody is an anti-GITR antibody that is disclosed in WO2015/184099, e.g., antibody Hum231 #1 or Hum231 #2, or the CDRs thereof, or a derivative thereof (e.g., pab1967, pab1975 or pab1979). In certain embodiments, an anti-GITR antibody is an anti-GITR antibody that is disclosed in JP2008278814, WO09/009116, WO2013/039954, US20140072566, US20140072565, US20140065152, or WO2015/026684, or is INBRX-110 (INHIBRx), LKZ-145 (Novartis), or MEDI-1873 (MedImmune). In certain embodiments, an anti-GITR antibody is an anti-GITR antibody that is described in PCT/US2015/033991 (e.g., an antibody comprising the variable regions of 28F3, 18E10 or 19D3). In some embodiments, the anti-GITR comprises a heavy chain comprising the sequence of SEQ ID NO: 3473, and a light chain comprising the sequence of SEQ ID NO: 3474. In some embodiments, the anti-GITR comprises a heavy chain comprising the sequence of SEQ ID NO: 3475, and a light chain comprising the sequence of SEQ ID NO: 3476. In some embodiments, the anti-GITR comprises a heavy chain comprising the sequence of SEQ ID NO: 3477, and a light chain comprising the sequence of SEQ ID NO: 3478. In some embodiments, the anti-GITR comprises a heavy chain comprising the sequence of SEQ ID NO: 3479, and a light chain comprising the sequence of SEQ ID NO: 3480. In some embodiments, the anti-GITR comprises a heavy chain comprising the sequence of SEQ ID NO: 3481, and a light chain comprising the sequence of SEQ ID NO: 3482.

[0410] In certain embodiments, an anti-GITR antibody for the present combination cross-competes with an anti-GITR antibody described herein, e.g., TRX518, MK4166 or an antibody comprising a VH domain and a VL domain amino acid sequence described herein. In some embodiments, an anti-GITR antibody for the present combination binds the same epitope as that of an anti-GITR antibody described herein, e.g., TRX518, MK4166 or an antibody comprising a VH domain and a VL domain amino acid sequence described herein. In certain embodiments, an anti-GITR antibody comprises the six CDRs of TRX518, MK4166 or those of an antibody comprising a VH domain and a VL domain amino acid sequence described herein.

[0411] A2AR, A2BR, CD39, CD73

[0412] In the “adenosinergic pathway” or “adenosine signaling pathway” as used herein ATP is converted to adenosine by the ectonucleotidases CD39 and CD73 resulting in inhibitory signaling through adenosine binding by one or more of the inhibitory adenosine receptors “Adenosine A2A Receptor” (A2AR, also known as ADORA2A) and “Adenosine A2B Receptor” (A2BR, also known as ADORA2B). Adenosine is a nucleoside with immunosuppressive properties and is present in high concentrations in the tumor microenvironment restricting immune cell infiltration, cytotoxicity and cytokine production. Thus, adenosine signaling is a strategy of cancer cells to avoid host immune system clearance. Adenosine signaling through A2AR and A2BR is an important checkpoint in cancer therapy that is activated by high adenosine concentrations typically present in the tumor microenvironment. CD39, CD73, A2AR and A2BR are expressed by most immune cells, including T cells, invariant natural killer cells, B cells, platelets, mast cells and eosinophils. Adenosine signaling through A2AR and A2BR counteracts T cell receptor mediated activation of immune cells and results in increased numbers of Tregs and decreased activation of DCs and effector T cells. The term “CD39” as used herein includes human CD39 (hCD39), variants, isoforms, and species homologs of hCD39, and analogs having at least one common epitope. The term “CD73” as used herein includes human CD73 (hCD73), variants, isoforms, and species homologs of hCD73, and analogs having at least one common epitope. The term “A2AR” as used herein includes human A2AR (hA2AR), variants, isoforms, and species homologs of hA2AR, and analogs having at least one common epitope. The term “A2BR” as used herein includes human A2BR (hA2BR), variants, isoforms, and species homologs of hA2BR, and analogs having at least one common epitope.

[0413] In some embodiments, the immunomodulator is an inhibitor of A2AR. A2AR inhibitors include, without limitation, small molecule inhibitors such as istradefylline (KW-6002; CAS #: 155270-99-8), PBF-509 (Palobiopharma), ciforadenant (CPI-444: Corvus Pharma/Genentech; CAS #: 1202402-40-1), ST1535 ([2butyl-9-methyl-8-(2H-1,2,3-triazol 2-yl)-9H-purin-6-xylamine]; CAS #: 496955-42-1), ST4206 (see Stasi et al., 2015, Europ J Pharm 761:353-361; CAS #: 1246018-36-9), tozadenant (SYN115; CAS #: 870070-55-6), V81444 (see WO 2002/055082), preladenant (SCH420814; Merck; CAS #: 377727-87-2), vipadenant (BUBO 14; CAS #: 442908-10-3), ST1535 (CAS #: 496955-42-1), SCH412348 (CAS #: 377727-26-9), SCH442416 (Axon 2283; Axon Medchem; CAS #: 316173-57-6), ZM241385 (4-(2-(7-amino-2-(2-furyl)-(1,2,4)triazolo(2,3-a)-(1,3,5)triazin-5-yl-amino)ethyl)phenol; Cas #: 139180-30-6), AZD4635 (AstraZeneca), AB928 (a dual A2AR/A2BR small molecule inhibitor; Arcus Biosciences) and SCH58261 (see Popoli et al., 2000, Neuropsychopharm 22:522-529; CAS #: 160098-96-4).

[0414] In some embodiments, the immunomodulator is an inhibitor of A2BR. A2BR inhibitors include, without limitation, AB928 (a dual A2AR7A2BR small molecule inhibitor; Arcus Biosciences), MRS 1706 (CAS #: 264622-53-9), GS6201 (CAS #: 752222-83-6) and PBS 1115 (CAS #: 152529-79-8). CD39 inhibitors include, without limitation, A001485 (Arcus Biosciences), PSB 069 (CAS #: 78510-31-3) and the anti-CD39 monoclonal antibody IPH5201 (Innate Pharma; see Perrot et ah, 2019, Cell Reports 8:2411-2425.E9).

[0415] In some embodiments, the immunomodulator is an inhibitor of CD39. CD39 inhibitors include, without limitation, A001485 (Arcus Biosciences), PSB 069 (CAS #: 78510-31-3) and the anti-CD39 monoclonal antibody IPH5201 (Innate Pharma; see Perrot et ah, 2019, Cell Reports 8:2411-2425.E9).

[0416] In some embodiments, the immunomodulator is an inhibitor of CD73. CD73 inhibitors include, without limitation, anti-CD73 antibodies such as CPI-006 (Corvus Pharmaceuticals), MEDI9447 (Medlmmune; see WO2016075099), IPH5301 (Innate Pharma; see Perrot et al., 2019, Cell Reports 8:2411-2425. E9), the anti-CD73 antibodies described in WO2018/110555, the small molecule inhibitors PBS 12379 (Tocris Bioscience; CAS #: 1802226-78-3), A000830, A001190 and A001421 (Arcus Biosciences; see Becker et al., 2018, Cancer Research 78(13 Supplement):3691-3691, doi: 10.1158/1538-7445.AM2018-3691), CB-708 (Calithera Biosciences) and purine cytotoxic nucleoside analogue-based diphosphonates as described by Allard et al., 2018 (Immunol Rev., 276(1): 121-144).

[0417] VISTA

[0418] “V-domain Ig suppressor of T cell activation” (VISTA, also known as C10orf54) bears homology to PD-L1 but displays a unique expression pattern restricted to the hematopoietic compartment. The term “VISTA” as used herein includes human VISTA (hVISTA), variants, isoforms, and species homologs of hVISTA, and analogs having at least one common epitope. VISTA induces T cell suppression and is expressed by leukocytes within tumors. In some embodiments, the immunomodulator is an inhibitor of VISTA. VISTA inhibitors include, without limitation, anti-VISTA antibodies such as JNJ-61610588 (onvatilimab; Janssen Biotech) and the small molecule inhibitor CA-170 (anti-PD-L1/L2 and anti-VISTA small molecule; CAS #: 1673534-76-3)

[0419] IDO

[0420] “Indoleamine 2,3-dioxygenase” (IDO) is a tryptophan catabolic enzyme with immune-inhibitory properties. The term “IDO” as used herein includes human IDO (hIDO), variants, isoforms, and species homologs of hIDO, and analogs having at least one common epitope. IDO is the rate limiting enzyme in tryptophan degradation catalyzing its conversion to kynurenine. Therefore, IDO is involved in depletion of essential amino acids. It has also been shown to be involved in suppression of T and NK cells, generation and activation of Tregs and myeloid-derived suppressor cells, and promotion of tumor angiogenesis. IDO is overexpressed in many cancers and was shown to promote immune system escape of tumor cells and to facilitate chronic tumor progression when induced by local inflammation.

[0421] In some embodiments, the immunomodulator is an inhibitor of IDO. IDO inhibitors include, without limitation, exiguamine A, epacadostat (INCB024360; InCyte; see U.S. Pat. No. 9,624,185), indoximod (Newlink Genetics; CAS #: 110117-83-4), NLG919 (Newlink Genetics/Genentech; CAS #: 1402836-58-1), GDC-0919 (Newlink Genetics/Genentech; CAS #: 1402836-58-1), F001287 (Flexus Biosciences/BMS; CAS #: 2221034-29-1), KHK2455 (Cheong et al., 2018, Expert Opin Ther Pat. 28(4):317-330), PF-06840003 (see WO 2016/181348), navoximod (RG6078, GDC-0919, NLG919; CAS #: 1402837-78-8), linrodostat (BMS-986205; Bristol-Myers Suibb; CAS #: 1923833-60-6), small molecules such as 1-methyl-tryptophan, pyrrolidine-2, 5-dione derivatives (see WO 2015/173764) and the IDO inhibitors disclosed by Sheridan, 2015, Nat Biotechnol 33:321-322.

[0422] TDO

[0423] In some embodiments the immunomodulator can target the signal mediated by “tryptophan-2, 3-dioxygenase” (TDO). TDO represents an alternative route to IDO in tryptophan degradation and is involved in immune suppression. Since tumor cells may catabolize tryptophan via TDO instead of IDO, TDO may represent an additional target for checkpoint blockade. Indeed, several cancer cell lines have been found to upregulate TDO and TDO may complement IDO inhibition. The term “TDO” as used herein includes human TDO (hTDO), variants, isoforms, and species homologs of hTDO, and analogs having at least one common epitope with hTDO. In some embodiments, the immunomodulator is an inhibitor of TDO. TDO inhibitors include, without limitation, 4-(indol-3-yl)-pyrazole derivatives (see U.S. Pat. No. 9,126,984 and US 2016/0263087), 3-indol substituted derivatives (see WO 2015/140717, WO 2017/025868, WO 2016/147144), 3-(indol-3-yl)-pyridine derivatives (see US 2015/0225367 and WO 2015/121812), dual IDO/TDO antagonist, such as small molecule dual IDO/TDO inhibitors disclosed in WO 2015/150097, WO 2015/082499, WO 2016/026772, WO 2016/071283, WO2016/071293, WO 2017/007700, and the small molecule inhibitor CB548 (Kim, C, et al., 2018, Annals Oncol 29 (suppl_8): viii400-viii441).

[0424] Siglec

[0425] The “Sialic acid binding immunoglobulin type lectin” (Siglec) family members recognize sialic acids and are involved in distinction between “self and “non-self’. The term “Siglecs” as used herein includes human Siglecs (hSiglecs), variants, isoforms, and species homologs of hSiglecs, and analogs having at least one common epitope with one or more hSiglecs. The human genome contains 14 Siglecs of which several are involved in immunosuppression, including, without limitation, Siglec-2, Siglec-3, Siglec-7 and Siglec-9. Siglec receptors bind glycans containing sialic acid, but differ in their recognition of the linkage regiochemistry and spatial distribution of sialic residues. The members of the family also have distinct expression patterns. A broad range of malignancies overexpress one or more Siglecs.

[0426] In some embodiments, the immunomodulator is an inhibitor of Siglec. Siglec inhibitors include, without limitation, the anti-Sigle-7 antibodies disclosed in US 2019/023786 and WO 2018/027203 (e.g., an antibody comprising a variable heavy chain region according to SEQ ID NO: 3515 and a variable light chain region according to SEQ ID NO: 3516), the anti-Siglec-2 antibody inotuzumab ozogamicin (Besponsa; see U.S. Pat. Nos. 8,153,768 and 9,642,918), the anti-Siglec-3 antibody gemtuzumab ozogamicin (Mylotarg; see U.S. Pat. No. 9,359,442) or the anti-Siglec-9 antibodies disclosed in US 2019/062427, US 2019/023786, WO 2019/011855, WO2019/011852, US 2017/306014 and EP 3 146 979.

[0427] CD20

[0428] “CD20” is an antigen expressed on the surface of B and T cells. High expression of CD20 can be found in cancers, such as B cell lymphomas, hairy cell leukemia, B cell chronic lymphocytic leukemia, and melanoma cancer stem cells. The term “CD20” as used herein includes human CD20 (hCD20), variants, isoforms, and species homologs of hCD20, and analogs having at least one common epitope. In some embodiments, the immunomodulator is an inhibitor of CD20. CD20 inhibitors include, without limitation, anti-CD20 antibodies such as rituximab (RITUXAN; IDEC-102; IDEC-C2B8; see U.S. Pat. No. 5,843,439), ABP 798 (rituximab biosimilar), ofatumumab (2F2; see WO2004/035607), obinutuzumab, ocrelizumab (2h7; see WO 2004/056312), ibritumomab tiuxetan (Zevalin), tositumomab, ublituximab (LFB-R603; LFB Biotechnologies) and the antibodies disclosed in US 2018/0036306 (e.g., an antibody comprising light and heavy chains according to SEQ ID NOS: 1-3 and 4-6, or 7 and 8, or 9 and 10).

[0429] GARP

[0430] “Glycoprotein A repetitions predominant” (GARP) plays a role in immune tolerance and the ability of tumors to escape the patient's immune system. The term “GARP” as used herein includes human GARP (hGARP), variants, isoforms, and species homologs of hGARP, and analogs having at least one common epitope. GARP is expressed on lymphocytes including Treg cells in peripheral blood and tumor infiltrating T cells at tumor sites. It is hypothesized to bind to latent “transforming growth factor b” (TGF-b). Disruption of GARP signaling in Tregs results in decreased tolerance and inhibits migration of Tregs to the gut and increased proliferation of cytotoxic T cells. In some embodiments, the immunomodulator is an inhibitor of GARP. GARP inhibitors include, without limitation, anti-GARP antibodies such as ARGX-115 (arGEN-X) and the antibodies and methods for their production as disclosed in US 2019/127483, US 2019/016811, US 2018/327511, US 2016/251438, EP 3 253 796.

[0431] CD47/SIRP

[0432] “CD47” is a transmembrane protein that binds to the ligand “signal-regulatory protein alpha” (SIRPa). The term “CD47” as used herein includes human CD47 (hCD47), variants, isoforms, and species homologs of hCD47, and analogs having at least one common epitope with hCD47. The term “SIRPa” as used herein includes human SIRPa (hSIRPa), variants, isoforms, and species homologs of hSIRPa, and analogs having at least one common epitope with hSIRPa. CD47 signaling is involved in a range of cellular processes including apoptosis, proliferation, adhesion and migration. CD47 is overexpressed in many cancers and functions as “don't eat me” signal to macrophages. Blocking CD47 signaling through inhibitory anti-CD47 or anti-SIRPa antibodies enables macrophage phagocytosis of cancer cells and fosters the activation of cancer-specific T lymphocytes. In some embodiments, the immunomodulator is an inhibitor of CD47. CD47 inhibitors include, without limitation, anti-CD47 antibodies such as HuF9-G4 (Stanford University/Forty Seven), CC-90002/ENBRX-103 (Celgene/Inhibrx), SRF231 (Surface Oncology), IBI188 (Innovent Biologies), AO-176 (Arch Oncology), bispecific antibodies targeting CD47 including TG-1801 (NI-1701; bispecific monoclonal antibody targeting CD47 and CD19; Novimmune/TG Therapeutics) and NI-1801 (bispecific monoclonal antibody targeting CD47 and mesothelin; Novimmune), and CD47 fusion proteins such as ALX148 (ALX Oncology; see Kauder et al., 2019, PLoS One, doi: 10.1371/joumal.pone.0201832). In some embodiments, the immunomodulator is an inhibitor of SIRPa. SIRPa inhibitors include, without limitation, anti-SIRPa antibodies such as OSE-172 (Boehringer Ingelheim/OSE), FSI-189 (Forty Seven), anti-SIRPa fusion proteins such as TTI-621 and TTI-662 (Trillium Therapeutics; see WO 2014/094122).

[0433] PVRIG

[0434] “Poliovirus receptor related immunoglobulin domain containing” (PVRIG, also known as CD112R) binds to “Poliovirus receptor-related 2” (PVRL2). PVRIG and PVRL2 are overexpressed in a number of cancers. PVRIG expression also induces TIGIT and PD-1 expression and PVRL2 and PVR (a TIGIT ligand) are co-overexpressed in several cancers. Blockade of the PVRIG signaling pathway results in increased T cell function and CD8+ T cell responses and, therefore, reduced immune suppression and elevated interferon responses. The term “PVRIG” as used herein includes human PVRIG (hPVRIG), variants, isoforms, and species homologs of hPVRIG, and analogs having at least one common epitope with hPVRIG. “PVRL2” as used herein includes hPVRL2, as defined above.

[0435] In some embodiments, the immunomodulator is an inhibitor of PVRIG. PVRIG inhibitors include, without limitation, anti-PVRIG antibodies such as COM701 (CGEN-15029) and antibodies and method for their manufacture as disclosed in, e.g., WO 2018/033798 (e.g., CHA.7.518.1H4(S241P), CHA.7.538.1.2.H4(S241P), CPA.9.086H4(S241P), CPA.9.083H4(S241P), CHA.9.547.7.H4(S241P), CHA.9.547.13.H4(S241P) and antibodies comprising a variable heavy domain according to SEQ ID NO: 3491 and a variable light domain according to SEQ ID NO: 3492 of WO 2018/033798 or antibodies comprising a heavy chain according to SEQ ID NO: 3493 and a light chain according to SEQ ID NO: 3494; WO 2018/033798 further discloses anti-TIGIT antibodies and combination therapies with anti-TIGIT and anti-PVRIG antibodies), WO2016134333, WO2018017864 and anti-PVRIG antibodies and fusion peptides as disclosed in WO 2016/134335.

[0436] CSF1R

[0437] The “colony-stimulating factor 1” pathway is another checkpoint that can be targeted according to the disclosure. CSF1R is a myeloid growth factor receptor that binds CSF1. Blockade of the CSF1R signaling can functionally reprogram macrophage responses, thereby enhancing antigen presentation and anti-tumor T cell responses. The term “CSF1R” as used herein includes human CSF1R (hCSFIR), variants, isoforms, and species homologs of hCSFIR, and analogs having at least one common epitope with hCSFIR. The term “CSF1” as used herein includes human CSF1 (hCSF1), variants, isoforms, and species homologs of hCSF1, and analogs having at least one common epitope with hCSF1.

[0438] In some embodiments, the immunomodulator is an inhibitor of CSF1R. CSF1R inhibitors include, without limitation, anti-CSFIR antibodies cabiralizumab (FPA008; FivePrime; see WO 2011/140249, WO 2013/169264 and WO 2014/036357), IMC-CS4 (EiiLilly), emactuzumab (RO5509554; Roche), RG7155 (WO 2011/70024, WO 2011/107553, WO 2011/131407, WO 2013/87699, WO 2013/119716, WO 2013/132044) and the small molecule inhibitors BLZ945 (CAS #: 953769-46-5) and pexidartinib (PLX3397; Selleckchem; CAS #: 1029044-16-3). CSF1 inhibitors include, without limitation, anti-CSF1 antibodies disclosed in EP 1 223 980 and Weir et al., 1996 (J Bone Mineral Res 11: 1474-1481), WO 2014/132072, and antisense DNA and RNA as disclosed in WO 2001/030381.

[0439] NOX

[0440] “Nicotinamide adenine dinucleotide phosphate NADPH oxidase” refers to an enzyme of the NOX family of enzymes of myeloid cells that generate immunosuppressive reactive oxygen species (ROS). Five NOX enzymes (NOX1 to NOX5) have been found to be involved in cancer development and immunosuppression. Elevated ROS levels have been detected in almost all cancers and promote many aspects of tumor development and progression. NOX produced ROS dampens NK and T cell functions and inhibition of NOX in myeloid cells improves anti-tumor functions of adjacent NK cells and T cells. The term “NOX” as used herein includes human NOX (hNOX), variants, isoforms, and species homologs of hNOX, and analogs having at least one common epitope with hNOX.

[0441] In some embodiments, the immunomodulator is an inhibitor of NOX. Exemplary NOX inhibitors include, without limitation, NOX1 inhibitors such as the small molecule ML171 (Gianni et al., 2010, ACS Chem Biol 5(10):981-93, NOS31 (Yamamoto et al., 2018, Biol Pharm Bull. 41(3):419-426), NOX2 inhibitors such as the small molecules ceplene (histamine dihydrochloride; CAS #: 56-92-8), BJ-1301 (Gautam et al., 2017, Mol Cancer Ther 16(10):2144-2156; CAS #: 1287234-48-3) and inhibitors described by Lu et al., 2017, Biochem Pharmacol 143:25-38, NOX4 inhibitors such as the small molecule inhibitors VAS2870 (Altenhofer et al., 2012, Cell Mol Life Sciences 69(14):2327-2343), diphenylene iodonium (CAS #: 244-54-2) and GKT137831 (CAS #: 1218942-37-0; see Tang et al., 2018, 19(10):578-585).

[0442] CD94/NKG2A

[0443] “CD94/NKG2A” is an inhibitory receptor predominantly expressed on the surface of natural killer cells and of CD8+ T cells. The term “CD94/NKG2A” as used herein includes human CD94/NKG2A (hCD94/NKG2A), variants, isoforms, and species homologs of hCD94/NKG2A, and analogs having at least one common epitope. The CD94/NKG2A receptor is a heterodimer comprising CD94 and NKG2A. It suppresses NK cell activation and CD8+ T cell function, probably by binding to ligands such as HLA-E. CD94/NKG2A restricts cytokine release and cytotoxic response of natural killer cells (NK cells), Natural Killer T cells (NK-T cells) and T cells (a/b and g/d). NKG2A is frequently expressed in tumor infiltrating cells and HLA-E is overexpressed in several cancers. In some embodiments, the immunomodulator is an inhibitor of CD94/NKg2A. CD94/NKG2A inhibitors include, without limitation, monalizumab (IPH2201; Innate Pharma) and the antibodies and method for their production as disclosed in U.S. Pat. No. 9,422,368 (e.g., humanized Z199; see EP 2628 753), EP 3 193 929 and WO2016/032334 (e.g., humanized Z270; see EP 2628 753). In some embodiments, an anti-NKG2A antibody has a heavy chain sequence according to any one of SEQ ID NOS: 3517-3521, and a light chain according to SEQ ID NO: 3522.

[0444] Activators

[0445] In some embodiment, the immunomodulator comprises an immune checkpoint activator, e.g., an agonist of at least one of: CD27, CD70, CD40, CD40LG, TNF receptor superfamily member 4 (TNFRSF4, OX40); TNF superfamily member 4 (TNFSF4, OX40L), GITR (TNF receptor superfamily member 18, TNFRSF18, CD357), TNFSF18 (GITRL), CD137 (TNFRSF9, tumor necrosis factor receptor superfamily member 9, 4-1BB, ILA, induced by lymphocyte activation), CD137L (TNFSF9), CD28, CD278 (inducible T cell co-stimulator, ICOS), inducible T cell co-stimulator ligand (ICOSLG, B7H2), CD80 (B7-1), nectin cell adhesion molecule 2 (NECTIN2, CD112), CD226 (DNAM-1), Poliovirus receptor (PVR) cell adhesion molecule (PVR, CD155), CD16, killer cell lectin like receptor K1 (KLRKI1, NKG2D, CD314), or SLAM family member 7 (SLAMF7). In some embodiment, the agonist is an antibody or an antigen-binding fragment thereof.

### Methods of Treatment

[0446] Provided herein in some embodiments is a method of treatment comprising administering to a subject in need thereof a combination as described herein. In some instances, a dose for the immunomodulator, e.g., an anti-PD-1 antibody molecule, e.g., pembrolizumab, is from about 1 mg/kg to about 10 mg/kg, e.g., 3 mg/kg. In one embodiment, the immunomodulator, e.g., the anti-PD-1 antibody molecule, e.g., Pembrolizumab is administered after treatment, e.g., after treatment of a cancer with the half-life extended immune cell engaging protein. In one embodiment, the immunomodulator, e.g., the anti-PD-1 antibody molecule, e.g., Pembrolizumab is administered before treatment, e.g., before treatment of a cancer with the half-life extended immune cell engaging protein. In one embodiment, the immunomodulator, e.g., the anti-PD-1 antibody molecule, e.g., Pembrolizumab is administered concurrently with the half-life extended immune cell engaging protein.

[0447] In some embodiments, a composition comprising the combination, or a composition comprising the immunomodulator, e.g., an PD-1 antibody, e.g., Pembrolizumab, is administered at a flat dose regardless of the weight of the patient. For example, an anti-PD-1 antibody in some embodiments is administered at a flat dose of about 0.1, 0.5, 1, 2, 3, 4, 5, 10, 15, 20, 50, 75, 80, 200, 240, 300, 360, 400, 480, 500, 750 or 1500 mg or any other dose disclosed herein, without regard to the patient's weight. In some embodiments, a composition comprising the combination, or a composition comprising the immunomodulator, e.g., an PD-1 antibody, e.g., Pembrolizumab, is administered at a weight-based dose at any dose disclosed herein.

[0448] In certain embodiments of the present combination therapy methods, the therapeutically effective dosage of the immunomodulator, e.g., an anti-PD-1 antibody or antigen-binding portion thereof, comprises about 60 mg, about 80 mg, about 100 mg, about 120 mg, about 140, about 160 mg, about 180 mg, about 200 mg, about 220 mg, about 240 mg, about 260 mg, about 280 mg, or about 300 mg. In some embodiments, the therapeutically effective dosage of the immunomodulator, e.g., the anti-PD-1 antibody or antigen-binding portion thereof, comprises about 310 mg, about 320 mg, about 330 mg, about 340 mg, about 350 mg, about 360 mg, about 370 mg, about 380 mg, about 390 mg, about 400 mg, about 410 mg, about 420 mg, about 430 mg, about 440 mg, about 450 mg, about 460 mg, about 470 mg, about 480 mg, about 490 mg, or about 500 mg. In some embodiments, the dose of the immunomodulator, e.g., an anti-PD-1 antibody or antigen-binding portion thereof, in the composition is between about 60 mg and about 300 mg, between about 60 mg and about 100 mg, between about 100 mg and about 200 mg, or between about 200 mg and about 300 mg. In some embodiments, the dose of the immunomodulator, e.g., an anti-PD-1 antibody or an antigen-binding fragment thereof, in the composition is from about 300 mg to about 500 mg, from about 300 mg to about 450 mg, from about 300 mg to about 400 mg, from about 300 mg to about 350 mg, from about 350 mg to about 500 mg, from about 400 mg to about 500 mg, or from about 450 mg to about 500 mg. In some embodiments, the amount of the immunomodulator, e.g., an anti-PD-1 antibody or antigen-binding fragment thereof, in the composition is at least about 80 mg, about 160 mg, or about 240 mg. In certain embodiments, the amount of the immunomodulator, e.g., an anti-PD-1 antibody or an antigen-binding fragment thereof, in the composition is at least about 360 mg or 480 mg. In some embodiments, the dose of the immunomodulator, e.g., an anti-PD-1 antibody or antigen-binding fragment thereof, in the composition is at least about 240 mg or at least about 80 mg. In one embodiment, the amount of the anti-PD-1 antibody or antigen-binding fragment thereof, in the composition is about 360 mg. In another embodiment, the amount of the immunomodulator, e.g., an anti-PD-1 antibody or antigen-binding fragment thereof, in the composition is about 480 mg. In some embodiments, the dose of the immunomodulator, e.g., an anti-PD-1 antibody or antigen-binding fragment thereof, in the composition is a least about 0.5 mg/kg, at least about 1 mg/kg, at least about 2 mg/kg, at least about 3 mg/kg or at least about 5 mg/kg. In some embodiments, the dose of the immunomodulator, e.g., an anti-PD-1 antibody or antigen-binding fragment thereof, in the composition is between about 0.5 mg/kg and about 5 mg/kg, between about 0.5 mg/kg and about 5 mg/kg, between about 0.5 mg/kg and about 3 mg/kg or between about 0.5 mg/kg and about 2 mg/kg. In some embodiments, the dose of the immunomodulator, e.g., an anti-PD-1 antibody or antigen-binding fragment thereof, in the composition is a least about 1 mg/kg. The corresponding dose of the half-life extended immune cell engaging protein is calculated using the desired ratio.

[0449] In some embodiments, the immunomodulator, e.g., an anti-PD-1 antibody or an antigen-binding fragment thereof, is administered at a subtherapeutic dose, such as, a dose of the therapeutic agent that is significantly lower than the usual or FDA-approved dose when administered as monotherapy for the treatment of the cancer. The quantity of the half-life extended immune cell engaging protein in the combination is calculated based on the desired ratio. For instance, dosages of Nivolumab that are lower than the typical 3 mg/kg, but not less than 0.001 mg/kg, are subtherapeutic dosages. The subtherapeutic doses of an anti-PD-1 antibody or antigen-binding fragment thereof used in the methods herein are higher than 0.001 mg/kg and lower than 3 mg/kg. In some embodiments, a subtherapeutic dose is about 0.001 mg/kg-about 1 mg/kg, about 0.01 mg/kg-about 1 mg/kg, about 0.1 mg/kg-about 1 mg/kg, or about 0.001 mg/kg-about 0.1 mg/kg body weight. In some embodiments, the subtherapeutic dose is at least about 0.001 mg/kg, at least about 0.005 mg/kg, at least about 0.01 mg/kg, at least about 0.05 mg/kg, at least about 0.1 mg/kg, at least about 0.5 mg/kg, or at least about 1.0 mg/kg body weight.

[0450] In some embodiments, a composition comprising the combination, or a composition comprising the immunomodulator, or a composition comprising the half-life extended immune cell engaging protein, is administered by intravenous infusion once about per week, once about every 2 weeks, once about every 3 weeks, or once about a month. In one embodiment, 360 mg of the immunomodulator, e.g., an anti-PD-1 antibody or antigen binding fragment is administered once every 3 weeks. In another embodiment, 480 mg of the immunomodulator, e.g., an anti-PD-1 antibody or antigen binding fragment is administered once about once every 4 weeks. In some embodiments, a composition comprising the combination, or a composition comprising the immunomodulator, or a composition comprising the half-life extended immune cell engaging protein is administered as an infusion, wherein the infusion occurs over at least about 10 minutes, about 20 minutes, about 30 minutes, about 45 minutes, about 60 minutes, about 90 minutes, about 2 hours, about 3 hours, about 4 hours or about 5 hours.

[0451] Actual dosage levels of the immunomodulator and the half-life extended immune cell engaging protein, in single or separate compositions, can be flat or varied so as to obtain an amount of the active ingredient which is effective to achieve the desired therapeutic response for a particular patient, composition, and mode of administration, without being unduly toxic to the patient. The selected dosage level for the immunomodulator, the half-life extended immune cell engaging protein, or a combination of both, will depend upon a variety of pharmacokinetic factors including the activity of the particular compositions of the present disclosure employed, the route of administration, the time of administration, the rate of excretion of the particular compound being employed, the duration of the treatment, other drugs, compounds and/or materials used in combination with the particular compositions employed, the age, sex, weight, condition, general health and prior medical history of the patient being treated, and like factors well known in the medical arts. A composition of the present disclosure, comprising both immunomodulator and a half-life extended immune cell engaging protein in combination or individually, can be administered via one or more routes of administration using one or more of a variety of methods well known in the art. In some cases, the route and/or mode of administration varies depending upon the desired results.

[0452] In certain embodiments a combination as disclosed herein is used for a method of treating or ameliorating a proliferative disorder or condition, wherein the proliferative disorder or condition, e.g., the cancer, includes but is not limited to, a solid tumor, a soft tissue tumor (e.g., a hematological cancer, leukemia, lymphoma, or myeloma), and a metastatic lesion of any of the aforesaid cancers. In one embodiment, the cancer is a solid tumor. Examples of solid tumors include malignancies, e.g., sarcomas, adenocarcinomas, and carcinomas, of the various organ systems, such as those affecting the lung, breast, ovarian, lymphoid, gastrointestinal (e.g., colon), anal, genitals and genitourinary tract (e.g., renal, urothelial, bladder cells, prostate), pharynx, CNS (e.g., brain, neural or glial cells), head and neck, skin (e.g., melanoma), and pancreas, as well as adenocarcinomas which include malignancies such as colon cancers, rectal cancer, renal-cell carcinoma, liver cancer, non-small cell lung cancer, cancer of the small intestine and cancer of the esophagus. The cancer may be at an early, intermediate, late stage or metastatic cancer.

[0453] In one embodiment, the cancer is chosen from a solid tumor, e.g., a lung cancer (e.g., a non-small cell lung cancer (NSCLC) (e.g., a NSCLC with squamous and/or non-squamous histology)), a colorectal cancer, a melanoma (e.g., an advanced melanoma), a head and neck cancer (e.g., head and neck squamous cell carcinoma (HNSCC), a digestive/gastrointestinal cancer, a gastric cancer, a neurologic cancer, a glioblastoma (e.g., glioblastoma multiforme), an ovarian cancer, a renal cancer, a liver cancer, a pancreatic cancer, a prostate cancer, a liver cancer; a breast cancer, an anal cancer, a gastro-esophageal cancer, a thyroid cancer, a cervical cancer; or a hematological cancer (e.g., chosen from a Hodgkin lymphoma, a non-Hodgkin lymphoma, a lymphocytic leukemia, or a myeloid leukemia).

[0454] In some embodiments, the cancer is selected from: mesothelioma, a prostate cancer, a breast cancer, a brain cancer, a bladder cancer, a pancreatic carcinoma, a renal cancer, a solid tumor, a liver cancer, a leiomyosarcoma, an endometrium cancer, a breast cancer, a female reproductive system cancer, an ovarian carcinoma, a soft tissue sarcoma, a gastric cancer, a digestive/gastrointestinal cancer, a colorectal cancer, a glioblastoma multiforme, a head and neck cancer, a squamous cell carcinoma, a colon cancer, a gastric cancer, a rhabdomyosarcoma, an adrenal cancer, a lung cancer, an esophageal cancer, a colon cancer, a lung cancer, a non-small cell lung carcinoma (NSCLC), a neuroblastoma, a melanoma, glioblastoma multiforme, an ovarian cancer, an endocrine cancer, a respiratory/thoracic cancer, an anal cancer, a gastro-esophageal cancer, a thyroid cancer, a cervical cancer, an endometrial cancer, a hematological cancer, a leukemia, a lymphocytic leukemia, a multiple myeloma, a lymphoma, a Hodgkin's lymphoma, a non-Hodgkin's lymphoma, a lymphocytic leukemia, an anaplastic large-cell lymphoma (ALCL), or a myeloid leukemia. In some embodiments, the cancer is an ovarian carcinoma, pancreatic carcinoma, mesothelioma, prostate cancer, or lung cancer.

[0455] Methods and combinations disclosed herein are useful for treating metastatic lesions associated with the aforementioned cancers. In other embodiments, the subject is a mammal, e.g, a primate, e.g., a higher primate, e.g, a human (e.g, a patient having, or at risk of having, a disorder described herein). In one embodiment, the subject to be treated is in need of enhancing an immune response. In one embodiment, the subject has, or is at risk of, having a disorder described herein, e.g., a cancer as described herein. In certain embodiments, the subject is, or is at risk of being, immunocompromised. For example, the subject is undergoing or has undergone a chemotherapeutic treatment and/or radiation therapy. Alternatively, or in combination, the subject is, or is at risk of being, immunocompromised as a result of an infection.

[0456] “PD-L1” or “PD-L2” expression as used herein means any detectable level of expression of the designated PD-L protein on the cell surface or of the designated PD-L mRNA within a cell or tissue. PD-L protein expression may be detected with a diagnostic PD-L antibody in an IHC assay of a tumor tissue section or by flow cytometry. Alternatively, PD-L protein expression by tumor cells may be detected by PET imaging, using a binding agent (e.g., antibody fragment, affibody and the like) that specifically binds to the desired PD-L target, e.g., PD-L1 or PD-L2. Techniques for detecting and measuring PD-L mRNA expression include RT-PCR, real-time quantitative RT-PCR, RNAseq, and the Nanostring platform (J. Clin. Invest. 2017; 127(8):2930-2940).

[0457] In some embodiments, administering an immune cell engaging protein as described herein results in an increased level or expression of an immune checkpoint protein, e.g., PD-1. In some embodiments, administering an immune cell engaging protein as described herein, e.g., a half-life extended immune cell engaging protein, increases the sensitivity of a subject to a therapy comprising administering an immunomodulator, e.g., an immune checkpoint inhibitor, e.g., an anti-PD-1 antibody. In some embodiments, administering an immune cell engaging protein as described herein improves the efficacy of a therapy comprising administering an immunomodulator to a subject. For instance, in some cases, administering an immune cell engaging protein (e.g., a half-life extended immune cell engaging protein) as described herein, increases the sensitivity of a non-responder subject to a therapy comprising administering an immunomodulator, e.g., an immune checkpoint inhibitor, e.g., an anti-PD-1 antibody, e.g., Pembrolizumab, Nivolumab. A “non-responder subject”, when referring to a specific anti-tumor response to treatment with a therapy, means the subject did not exhibit the anti-tumor response.

[0458] In some embodiments, the subject has previously been treated with an immunomodulator, e.g., an anti-PD-1 antibody. In some embodiments, the subject has or is identified as having a tumor that has one or more of high PD-L1 level or expression and/or Tumor Infiltrating Lymphocyte (TIL)+. In certain embodiments, the subject has or is identified as having a tumor that has high PD-L1 level or expression and TIL+. In some embodiments, the methods described herein further describe identifying a subject based on having a tumor that has one or more of high PD-L1 level or expression and/or TIL+. In certain embodiments, the methods described herein further describe identifying a subject based on having a tumor that has high PD-L1 level or expression and TIL+. In some embodiments, tumors that are TIL+ are positive for CD8 and IFNγ. In some embodiments, the subject has or is identified as having a high percentage of cells that are positive for one or more of PD-L1, CD8, and/or IFNγ. In certain embodiments, the subject has or is identified as having a high percentage of cells that are positive for all of PD-L1, CD8, and IFNγ. In some embodiments, the methods described herein further describe identifying a subject based on having a high percentage of cells that are positive for one or more of PD-L1, CD8, and/or IFNγ. In certain embodiments, the methods described herein further describe identifying a subject based on having a high percentage of cells that are positive for all of PD-L1, CD8, and IFNγ. In some embodiments, the subject has or is identified as having one or more of PD-L1, CD8, and/or IFNγ, and one or more of a lung cancer, e.g., squamous cell lung cancer or lung adenocarcinoma; a head and neck cancer; a squamous cell cervical cancer; a stomach cancer; a thyroid cancer; and/or a melanoma. In certain embodiments, the methods described herein further describe identifying a subject based on having one or more of PD-L1, CD8, and/or IFNγ, and one or more of a lung cancer, e.g., squamous cell lung cancer or lung adenocarcinoma; a head and neck cancer; a squamous cell cervical cancer; a stomach cancer; a thyroid cancer; and/or a melanoma.

### Compositions, Dosages, and Administration

[0459] Disclosed herein, as described above, are combinations comprising an immunomodulator, a half-life extended immune cell engaging protein, and optionally one or more additional therapeutic agents. Each therapeutic agent in a combination (e.g., an immunomodulator, a half-life extended immune cell engaging protein, and optionally one or more additional therapeutic agents), in some embodiments, is administered either alone or in a medicament (also referred to herein as a composition or a pharmaceutical composition) which comprises the therapeutic agent and one or more pharmaceutically acceptable carriers, excipients and diluents, according to standard pharmaceutical practice. The combinations provided herein, in some embodiments, are administered during periods of active disorder, or during a period of remission or less active disease. The combination, in some embodiments, are administered before another treatment, concurrently with another treatment, post-treatment, or during remission of the disorder.

[0460] Each therapeutic agent in a combination (e.g., an immunomodulator, a half-life extended immune cell engaging protein, and optionally one or more additional therapeutic agents), in some embodiments, is administered simultaneously (e.g., in the same medicament), concurrently (e.g., in separate medicaments administered one right after the other in any order) or sequentially in any order. Sequential administration is particularly useful when the therapeutic agents in the combination are in different dosage forms (e.g., one agent is atablet or capsule and another agent is a sterile liquid) and/or are administered on different dosing schedules, e.g., a chemotherapeutic that is administered at least daily and a biotherapeutic that is administered less frequently, such as once weekly, once every two weeks, or once every three weeks. In some embodiments, concurrent administration of two therapeutic agents does not require that the agents be administered at the same time or by the same route, as long as there is an overlap in the time period during which the agents are exerting their therapeutic effect. In some embodiments, simultaneous or sequential administration is contemplated, as is administration on different days or weeks.

[0461] Dosages and therapeutic regimens for the combinations as described herein, in some instances, are determined by a skilled artisan. For instance, in some embodiments, the combination comprising an immunomodulator, a half-life extended immune cell engaging protein as described herein is administered to a subject systemically (e.g., orally, parenterally, subcutaneously, intravenously, rectally, intramuscularly, intraperitoneally, intranasally, transdermally, or by inhalation or intracavitary installation), topically, or by application to mucous membranes, such as the nose, throat and bronchial tubes.

[0462] In certain embodiments, an immunomodulator is an anti-PD-1 antibody, and the anti-PD-1 antibody molecule is administered by injection (e.g., subcutaneously or intravenously) at a dose of about 1 to 30 mg/kg, e.g., about 5 to 25 mg/kg, about 10 to 20 mg/kg, about 1 to 5 mg/kg, or about 3 mg/kg. The dosing schedule, in some embodiments, varies, e.g., once a week to once every 2, 3, or 4 weeks. In one embodiment, the anti-PD-1 antibody molecule is administered at a dose from about 10 to 20 mg/kg every other week.

[0463] In one embodiment, the anti-PD-1 antibody molecule, e.g., Nivolumab or Pembrolizumab, is administered intravenously at a dose from about 1 mg/kg to 3 mg/kg, e.g., about 1 mg/kg, 2 mg/kg or 3 mg/kg, every two weeks. In one embodiment, the anti-PD-1 antibody molecule, e.g., Nivolumab, is administered intravenously at a dose of about 2 mg/kg at 3-week intervals. In one embodiment, Nivolumab or Pembrolizumab is administered in an amount from about 1 mg/kg to 5 mg/kg, e.g., 3 mg/kg, and may be administered over a period of 60 minutes, such as once a week to once every 2, 3 or 4 weeks.

[0464] In some embodiments of the combination, the immunomodulator is administered intravenously. In some embodiments of the combination, the half-life extended immune cell engaging protein, is administered intravenously. In some embodiments of the combination, the immunomodulator (e.g., an anti-PD-1 antibody molecule) is administered, e.g., intravenously, at least one, two, three, four, five, six, or seven days, e.g., three days, after a half-life extended immune cell engaging protein is administered, e.g., intravenously. In some embodiments of the combination, the immunomodulator (e.g., an anti-PD-1 antibody molecule) is administered, e.g., intravenously, at least one, two, three, four, five, six, or seven days, e.g., three days, before a half-life extended immune cell engaging protein is administered, e.g., intravenously. In some embodiments of the combination, the immunomodulator (e.g., an anti-PD-1 antibody molecule) is administered, e.g., intravenously, on the same day, as a half-life extended immune cell engaging protein is administered, e.g., intravenously. In some embodiments of a combination, the administration of the immunomodulator (e.g., an anti-PD-1 antibody molecule) and the half-life extended immune cell engaging protein results in enhanced reduction of a cancer/carcinoma, e.g., pancreatic carcinoma, ovarian carcinoma, prostate cancer, lung cancer, mesothelioma, relative to administration of each of these agents as a monotherapy. In certain embodiments, in a combination, the concentration of a half-life extended immune cell engaging protein, that is required to achieve inhibition, e.g., growth inhibition/tumor regression, is lower than the therapeutic dose of the agent as a monotherapy, e.g., 10-20%, 20-30%, 30-40%, 40-50%, 50-60%, 60-70%, 70-80%, or 80-90% lower. In certain embodiments, in a combination, the concentration of an immunomodulator, that is required to achieve inhibition, e.g., growth inhibition/tumor regression, is lower than the therapeutic dose of the agent as a monotherapy, e.g., 10-20%, 20-30%, 30-40%, 40-50%, 50-60%, 60-70%, 70-80%, or 80-90% lower.

[0465] In some embodiments of the combinations described herein, the immune cell engaging protein (e.g., a half-life extended immune cell engaging protein) is administered at a dosage of from about 0.5 ng/kg to about 500 ng/kg; e.g., from about 1 ng/kg to about 400 ng/kg, from about 2 ng/kg to about 300 ng/kg, from about 4 ng/kg to about 200 ng/kg, from about 8 ng/kg to about 100 ng/kg; from about 1 ng/kg to about 200 ng/kg, from about 1.3 ng/kg to about 160 ng/kg.

[0466] The combinations as described herein, in some embodiments, are used in combination with additional agents or therapeutic modalities. The combination therapies can be administered simultaneously or sequentially in any order. Any combination and sequence of the anti-PD-1 or PD-L1 antibody molecules and other therapeutic agents, procedures or modalities (e.g., as described herein) can be used

Combinations with Additional Therapeutic Agents

[0467] In certain embodiments, the combination of described herein are administered in combination with one or more of other antibody molecules, chemotherapy, other anti-cancer therapy (e.g., targeted anti-cancer therapies, gene therapy, viral therapy, RNA therapy bone marrow transplantation, nanotherapy, or oncolytic drugs), cytotoxic agents, immune-based therapies (e.g., cytokines or cell-based immune therapies), surgical procedures (e.g., lumpectomy or mastectomy) or radiation procedures, or a combination of any of the foregoing. The additional therapy may be in the form of adjuvant or neoadjuvant therapy. In some embodiments, the additional therapy is an enzymatic inhibitor (e.g., a small molecule enzymatic inhibitor) or a metastatic inhibitor. Exemplary cytotoxic agents that can be administered in combination with include antimicrotubule agents, topoisomerase inhibitors, anti-metabolites, mitotic inhibitors, alkylating agents, anthracyclines, vinca alkaloids, intercalating agents, agents capable of interfering with a signal transduction pathway, agents that promote apoptosis, proteosome inhibitors, and radiation (e.g., local or whole body irradiation (e.g., gamma irradiation). In other embodiments, the additional therapy is surgery or radiation, or a combination thereof. In other embodiments, the additional therapy is a therapy targeting an mTOR pathway, an HSP90 inhibitor, or a tubulin inhibitor.

[0468] In some embodiments, the combinations described herein are administered in combination with a chemotherapeutic agent. Examples of chemotherapeutic agents include alkylating agents such as thiotepa and cyclosphosphamide; alkyl sulfonates such as busulfan, improsulfan and piposulfan; aziridines such as benzodopa, carboquone, meturedopa, and uredopa; ethylenimines and methylamelamines including altretamine, triethylenemelamine, trietylenephosphoramide, triethylenethiophosphoramide and trimethylolomelamine; acetogenins (especially bullatacin and bullatacinone); a camptothecin (including the synthetic analogue topotecan); bryostatin; cally statin; CC-1065 (including its adozelesin, carzelesin and bizelesin synthetic analogues); cryptophycins (particularly cryptophycin 1 and cryptophycin 8); dolastatin; duocarmycin (including the synthetic analogues, KW-2189 and CBI-TMI); eleutherobin; pancratistatin; a sarcodictyin; spongistatin; nitrogen mustards such as chlorambucil, chlornaphazine, cholophosphamide, estramustine, ifosfamide, mechlorethamine, mechlorethamine oxide hydrochloride, melphalan, novembichin, phenesterine, prednimustine, trofosfamide, uracil mustard; nitrosureas such as carmustine, chlorozotocin, fotemustine, lomustine, nimustine, ranimustine; antibiotics such as the enediyne antibiotics (e.g. calicheamicin, especially calicheamicin gammall and calicheamicin phill, see, e g., Agnew, Chem. Inti. Ed. Engl., 33: 183-186 (1994); dynemicin, including dynemicin A; bisphosphonates, such as clodronate; an esperamicin; as well as neocarzinostatin chromophore and related chromoprotein enediyne antibiotic chromomophores), aclacinomysins, actinomycin, authramycin, azaserine, bleomycins, cactinomycin, carabicin, caminomycin, carzinophilin, chromomycins, dactinomycin, daunorubicin, detorubicin, 6-diazo-5-oxo-L-norleucine, doxorubicin (including morpholino-doxorubicin, cyanomorpholino-doxorubicin, 2-pyrrolino-doxorubicin and deoxydoxorubicin), epirubicin, esorubicin, idarubicin, marcellomycin, mitomycins such as mitomycin C, mycophenolic acid, nogalamycin, olivomycins, peplomycin, potfiromycin, puromycin, quelamycin, rodorubicin, streptonigrin, streptozocin, tubercidin, ubenimex, zinostatin, zorubicin; anti-metabolites such as methotrexate and 5-fluorouracil (5-FU); folic acid analogues such as denopterin, methotrexate, pteropterin, trimetrexate; purine analogs such as fludarabine, 6-mercaptopurine, thiamiprine, thioguanine; pyrimidine analogs such as ancitabine, azacitidine, 6-azauridine, carmofur, cytarabine, dideoxyuridine, doxifluridine, enocitabine, floxuridine; androgens such as calusterone, dromostanolone propionate, epitiostanol, mepitiostane, testolactone; anti-adrenals such as aminoglutethimide, mitotane, trilostane; folic acid replenisher such as frolinic acid; aceglatone; aldophosphamide glycoside; aminolevulinic acid; eniluracil; amsacrine; bestrabucil; bisantrene; edatraxate; defofamine; demecolcine; diaziquone; elformithine; elliptinium acetate; an epothilone; etoglucid; gallium nitrate; hydroxyurea; lentinan; lonidamine; maytansinoids such as maytansine and ansamitocins; mitoguazone; mitoxantrone; mopidamol; nitracrine; pentostatin; phenamet; pirarubicin; losoxantrone; podophyllinic acid; 2-ethylhydrazide; procarbazine; razoxane; rhizoxin; sizofuran; spirogermanium; tenuazonic acid; triaziquone; 2, 2′,2″-trichlorotriethylamine; trichothecenes (especially T-2 toxin, verracurin A, roridin A and anguidine); urethan; vindesine; dacarbazine; mannomustine; mitobronitol; mitolactol; pipobroman; gacytosine; arabinoside (“Ara-C”); cyclophosphamide; thiotepa; taxoids, e.g. paclitaxel and doxetaxel; chlorambucil; gemcitabine; 6-thioguanine; mercaptopurine; methotrexate; platinum analogs such as cisplatin and carboplatin; vinblastine; platinum; etoposide (VP-16); ifosfamide; mitoxantrone; vincristine; vinorelbine; novantrone; teniposide; edatrexate; daunomycin; aminopterin; xeloda; ibandronate; CPT-11; topoisomerase inhibitor RFS 2000; difluoromethylornithine (DMFO); retinoids such as retinoic acid; capecitabine; and pharmaceutically acceptable salts, acids or derivatives of any of the above. Also included are anti-hormonal agents that act to regulate or inhibit hormone action on tumors such as anti-estrogens and selective estrogen receptor modulators (SERMs), including, for example, tamoxifen, raloxifene, droloxifene, 4-hydroxytamoxifen, trioxifene, keoxifene, LY117018, onapristone, and toremifene (Fareston); aromatase inhibitors that inhibit the enzyme aromatase, which regulates estrogen production in the adrenal glands, such as, for example, 4(5)-imidazoles, aminoglutethimide, megestrol acetate, exemestane, formestane, fadrozole, vorozole, letrozole, and anastrozole; and anti androgens such as flutamide, nilutamide, bicalutamide, leuprolide, and goserelin; and pharmaceutically acceptable salts, acids or derivatives of any of the above.

[0469] In some embodiments, provided herein is a combination further comprising one or more additional therapeutic agents, and methods to treat a cancer using such a combination of an immunomodulator, a half-life extended immune cell engaging protein and an additional therapeutic agent. Non-limiting examples of such additional therapeutic agents include: a c-MET inhibitor, an Alk inhibitor, a CDK4/6 inhibitor, a PI3K-inhibitor, a BRAF inhibitor, a CAR T cell targeting CD19, a MEK inhibitor, a BCR-ABL inhibitor, or any combination thereof.

[0470] In one embodiment, the c-MET inhibitor is INC280 (formerly known as INCB28060). In one embodiment, the immunomodulator is an anti-PD-1 antibody (e.g., Nivolumab, Pembrolizumab or MSB0010718C), and the additional therapeutic agent is INC280, and the combination with a half-life extended immune cell engaging protein is used is a method of treating a cancer, e.g., a lung cancer (e.g., non-small cell lung cancer (NSCLC)), glioblastoma multiforme (GBM), a renal cancer, a liver cancer (e.g., a hepatocellular carcinoma) or a gastric cancer. In some embodiments, the cancer has, or is identified as having, a c-MET mutation (e.g., a c-MET mutation or a c-MET amplification). In certain embodiments, INC280 is administered at an oral dose of about 100 to 1000 mg, e.g., about 200 mg to 900 mg, about 300 mg to 800 mg, or about 400 mg to 700 mg, e.g., about 400 mg, 500 mg or 600 mg. The dosing schedule can vary from e.g., every other day to daily, twice or three times a day. In one embodiment, INC280 is administered at an oral dose from about 400 to 600 mg twice a day.

[0471] In one embodiment, the Alk inhibitor is LDK378 (also known as ceritinib (Zykadia®). In one embodiment, the immunomodulator is an anti-PD-1 antibody (e.g., Nivolumab, Pembrolizumab or MSB0010718C), and the additional therapeutic agent is LDK378, and the combination with a half-life extended immune cell engaging protein is used is a method of treating a cancer, e.g., a solid tumor, e.g., a lung cancer (e.g., non-small cell lung cancer (NSCLC)), a lymphoma (e.g., an anaplastic large-cell lymphoma or non-Hodgkin lymphoma), an inflammatory myofibroblastic tumor (IMT), or a neuroblastoma. In some embodiments, the NSCLC is a stage IIIB or IV NSCLC, or a relapsed locally advanced or metastic NSCLC. In some embodiments, the cancer (e.g., the lung cancer, lymphoma, inflammatory myofibroblastic tumor, or neuroblastoma) has, or is identified as having, an ALK rearrangement or translocation, e.g., an ALK fusion. In one embodiment, the ALK fusion is an EML4-ALK fusion, e.g., an EML4-ALK fusion. In another embodiment, the ALK fusion is an ALK-ROS1 fusion. In certain embodiments, the cancer has progressed on, or is resistant or tolerant to, a ROS1 inhibitor, or an ALK inhibitor, e.g., an ALK inhibitor other than LDK378. In some embodiments, the cancer has progressed on, or is resistant or tolerant to, crizotinib. In one embodiment, the subject is an ALK-naive patient, e.g., a human patient. In another embodiment, the subject is apatient, e.g., a human patient, that has been pre-treated with an ALK inhibitor. In another embodiment, the subject is a patient, e.g., a human patient, that has been pretreated with LDK378. In one embodiment, the half-life extended immune cell engaging protein, the LDK378 and the anti-PD-1 antibody (e.g., Nivolumab, Pembrolizumab or MSB0010718C) are administered to an ALK-naive patient. In another embodiment, the half-life extended immune cell engaging protein, the LDK378 and the anti-PD-1 antibody (e.g., Nivolumab, Pembrolizumab or MSB0010718C) are administered to a patient that has been pretreated with an ALK inhibitor. In yet another embodiment, the half-life extended immune cell engaging protein, the LDK378 and the anti-PD-1 antibody (e.g., Nivolumab, Pembrolizumab or MSB0010718C) are administered to a patient that has been pretreated with LDK378. In certain embodiments, LDK378 is administered at an oral dose of about 100 to 1000 mg, e.g., about 150 mg to 900 mg, about 200 mg to 800 mg, about 300 mg to 700 mg, or about 400 mg to 600 mg, e.g., about 150 mg, 300 mg, 450 mg, 600 mg or 750 mg. In certain embodiment, LDK378 is administered at an oral dose of about 750 mg or lower, e.g., about 600 mg or lower, e.g., about 450 mg or lower. In certain embodiments, LDK378 is administered with food. In other embodiments, the dose is under fasting condition. The dosing schedule can vary from e.g., every other day to daily, twice or three times a day. In one embodiment, LDK378 is administered daily. In one embodiment, LDK378 is administered at an oral dose from about 150 mg to 750 mg daily, either with food or in a fasting condition. In one embodiment, LDK378 is administered at an oral dose of about 750 mg daily, in a fasting condition. In one embodiment, LDK378 is administered at an oral dose of about 750 mg daily, via capsule or tablet. In another embodiment, LDK378 is administered at an oral dose of about 600 mg daily, via capsule or tablet. In one embodiment, LDK378 is administered at an oral dose of about 450 mg daily, via capsule or tablet. In one embodiment, LDK378 is administered at a dose of about 450 mg and the anti-PD-1 antibody (e.g., Nivolumab, Pembrolizumab or MSB0010718C) is administered at a dose of about 3 mg/kg. In another embodiment, the LDK378 dose is 600 mg and the anti-PD-1 antibody (e.g., Nivolumab, Pembrolizumab or MSB0010718C) dose is 3 mg/kg. In one embodiment, LDK378 is administered with a low fat meal.

[0472] In one embodiment, the CDK4/6 inhibitor is LEE011 (also known as Ribociclib®). In one embodiment, the immunomodulator is an anti-PD-1 antibody (e.g., Nivolumab, Pembrolizumab or MSB0010718C), and the additional therapeutic agent is LEE011, and the combination with a half-life extended immune cell engaging protein is used is a method of treating a cancer, e.g., a solid tumor, e.g., a lung cancer (e.g., non-small cell lung cancer (NSCLC)), a neurologic cancer, melanoma or a breast cancer, or a hematological malignancy, e.g., a lymphoma.

[0473] In one embodiment, the PI3K inhibitor is BKM120 or BYL719. In one embodiment, the immunomodulator is an anti-PD-1 antibody (e.g., Nivolumab, Pembrolizumab or MSB0010718C), and the additional therapeutic agent is BKM120 or BYL719, and the combination with a half-life extended immune cell engaging protein is used is a method of treating a cancer or a disorder, e.g., a solid tumor, e.g., a lung cancer (e.g., non-small cell lung cancer (NSCLC)), a prostate cancer, an endocrine cancer, an ovarian cancer, a melanoma, a bladder cancer, a female reproductive system cancer, a digestive/gastrointestinal cancer, a colorectal cancer, glioblastoma multiforme (GBM), a head and neck cancer, a gastric cancer, a pancreatic cancer or a breast cancer; or a hematological malignancy, e.g., leukemia, non-Hodgkin lymphoma; or a hematopoiesis disorder.

[0474] In one embodiment, the BRAF inhibitor is LGX818. In one embodiment, the immunomodulator is an anti-PD-1 antibody (e.g., Nivolumab, Pembrolizumab or MSB0010718C), and the additional therapeutic agent is LGX818, and the combination with a half-life extended immune cell engaging protein is used is a method of treating a cancer, e.g., a solid tumor, e.g., a lung cancer (e.g., non-small cell lung cancer (NSCLC)), a melanoma, e.g., advanced melanoma, a thyroid cancer, e.g., papillary thyroid cancer, or a colorectal cancer. In some embodiments, the cancer has, or is identified as having, a BRAF mutation (e.g., a BRAF V600E mutation), a BRAF wildtype, a KRAS wildtype or an activating KRAS mutation. In some embodiments, the cancer is at an early, intermediate or late stage.

[0475] In one embodiment, the additional therapeutic agent is a CAR T cell targeting CD19. In one embodiment, the immunomodulator is an anti-PD-1 antibody (e.g., Nivolumab, Pembrolizumab or MSB0010718C), and the additional therapeutic agent is the CAR T cell targeting CD19 (e.g., CTL019), and the combination with a half-life extended immune cell engaging protein is used is a method of treating a cancer, a solid tumor, or a hematological malignancy, e.g., a lymphocytic leukemia or a non-Hodgkin lymphoma. In one embodiment, the CAR T cell targeting CD19 has the USAN designation TISAGENLECLEUCEL-T. CTLO19 is made by a gene modification of T cells is mediated by stable insertion via transduction with a self-inactivating, replication deficient Lentiviral (LV) vector containing the CTLO19 transgene under the control of the EF-1 alpha promoter. CTLO19 is a mixture of transgene positive and negative T cells that are delivered to the subject on the basis of percent transgene positive T cells.

[0476] In one embodiment, the additional therapeutic agent is the MEK inhibitor (e.g., MEK162). In one embodiment, the immunomodulator is an anti-PD-1 antibody (e.g., Nivolumab, Pembrolizumab or MSB0010718C), and the additional therapeutic agent is MEK162, and the combination with a half-life extended immune cell engaging protein is used is a method of treating a cancer or a disorder, e.g., a melanoma, a colorectal cancer, a non-small cell lung cancer, an ovarian cancer, a breast cancer, a prostate cancer, a pancreatic cancer, a hematological malignancy or a renal cell carcinoma, a multisystem genetic disorder, a digestive/gastrointestinal cancer, a gastric cancer, or a colorectal cancer; or rheumatoid arthritis. In some embodiments, the cancer has, or is identified as having, a KRAS mutation.

[0477] In one embodiment, the additional therapeutic agent is the BCR-ABL inhibitor (e.g., AMN-107 (also known as Nilotinib, trade name Tasigna). In one embodiment, the immunomodulator is an anti-PD-1 antibody (e.g., Nivolumab, Pembrolizumab or MSB0010718C), and the additional therapeutic agent is AMN-107, and the combination with a half-life extended immune cell engaging protein is used is a method of treating a cancer or a disorder, e.g., a solid tumor, e.g., a neurologic cancer, a melanoma, a digestive/gastrointestinal cancer, a colorectal cancer, a head and neck cancer; or a hematological malignancy, e.g., chronic myelogenous leukemia (CML), a lymphocytic leukemia, a myeloid leukemia; Parkinson's disease; or pulmonary hypertension.

[0478] In one embodiment, the additional therapeutic agent is a small molecule PD-1/PD-L1 antagonist. In one embodiment, the small molecule PD-1/PD-L1 antagonist is PDI-1 (PD1/PD-L1 inhibitor 1) as described in Wang et al., A Small Molecule Antagonist of PD-1/PD-L1 Interactions Acts as an Immune Checkpoint Inhibitor for NSCLC and Melanoma Immunotherapy. Front. Immunol. 12:654463. doi: 10.3389/fimmu.2021.654463. In one embodiment, the small molecule PD-1/PD-L1 antagonist is a bioactive macrocyclic peptide as described in Magiera-Mularz et al. Bioactive macrocyclic inhibitors of the PD-1/PD-L1 immune checkpoint Angew. Chem. Int. Ed. 10.1002/anie.201707707.

### EXAMPLES

### Example 1: PSMA Targeting TriTAC Affects PD-1/PD-L1 Expression

[0479] T cells from two donors were co-cultured with 22Rv1 prostate cancer cells at a ratio of 10:1 and treated with PSMA targeting TriTAC (SEQ ID NO: 3340) at 10 μM, 100 μM, and 1 nM, GFP targeting TriTAC or vehicle for 48 hrs. Expression levels of PD-1 and PD-L1 were then measured by fluorescence activated cell sorting (FACS) analysis. FIG. 2A demonstrates the change in PD-1 expression levels after PSMA targeting TriTAC treatment. FIG. 2B demonstrates the change in PD-L1 expression levels after PSMA targeting TriTAC treatment.

[0480] 22Rv1 cancer cells were treated with 100 units/mL IFNγ or were co-cultured with resting T cells from a healthy donor then treated with PSMA targeting TriTAC for 48 hours. Expression levels of PD-L1 was then measured by FACS analysis. FIG. 3 demonstrates the PD-L1 levels after treatment with PSMA targeting TriTAC or IFNγ for 22Rv1 cancer cells.

[0481] PC3 cells were engineered to express PSMA and are called PC3-PSMA cells. PC3-PSMA cancer cells were treated 100 units/mL IFNγ or were co-cultured with resting T cells from a healthy donor then treated with PSMA targeting TriTAC for 48 hours. Expression of PD-L1 was then measured by FACS analysis. FIG. 4 demonstrates the PD-L1 levels after treatment with PSMA targeting TriTAC or IFNγ for PC3-PSMA cancer cells.

### Example 2: In Vivo Antitumor Activity Study of PSMA Targeting TriTAC in Combination with PD-1/PD-L1 Inhibitors

[0482] 22Rv1 prostate cancer model: NOD.Cg-Prkd^{scid} Il2rg^{tm1Wjl}/SzJ were subcutaneously implanted with a mixture of 22Rv1 prostate cancer cells and T cells at a ratio of 1:1 of 5×10⁶ cells each. Mice were randomized on day 6 when tumors reached ˜199 mm³. Treatment was initiated the following day on days 7-16 by intraperitoneal (i.p.) injection of vehicle, 500 μg/kg PSMA targeting TriTAC alone once a day, 10 mg/kg Atezolizumab alone twice weekly, 10 mg/kg Pembrolizumab alone twice weekly, 10 mg/kg Atezolizumab twice weekly in combination with 500 μg/kg PSMA targeting TriTAC once a day, or 10 mg/kg Pembrolizumab twice weekly in combination with 500 μg/kg PSMA targeting TriTAC once a day. Five mice were used for each treatment group. FIG. 5 demonstrates the tumor volumes under each treatment for 22Rv1 prostate cancer cells.

[0483] PC3-PSMA cancer model: NOD.Cg-Prkd^{scid} Il2rg^{tm1Wjl}/SzJ were subcutaneously implanted with a mixture of PC3-PSMA cancer cells and T cells at a ratio of 2:1 (10×10⁶ PC3-PSMA: 5×10⁶ T cells). Mice were randomized on day 5 when tumors reached ˜270 mm³. Treatment was initiated the following day on days 5-14 by intraperitoneal (i.p.) injection of vehicle, 1 μg/kg PSMA targeting TriTAC alone once a day, 10 μg/kg PSMA targeting TriTAC alone once a day, 100 μg/kg PSMA targeting TriTAC alone once a day, 10 mg/kg Pembrolizumab alone twice weekly, 10 mg/kg Pembrolizumab twice weekly in combination with 1 μg/kg PSMA targeting TriTAC once a day, or 10 mg/kg Pembrolizumab twice weekly in combination with 10 μg/kg PSMA targeting TriTAC once a day. Eight mice were used for each treatment group. FIG. 6 demonstrates the tumor volumes under each treatment for PC3-PSMA cancer cells.

### Example 3: MSLN Targeting TriTAC Affects PD-1/PD-L1 Expression

[0484] T cells from two donors were co-cultured with NCI-H292 lung cancer cells at a ratio of 10:1 and treated with MSLN targeting TriTAC (SEQ ID NO: 3376) at 10 μM, 100 μM, and 1 nM, GFP targeting TriTAC or vehicle for 48 hrs. Expression levels of PD-1 and PD-L1 were then measured by FACS analysis. FIG. 7A demonstrates the change in PD-1 expression levels after MSLN targeting TriTAC treatment. FIG. 7B demonstrates the change in PD-L1 expression levels after MSLN targeting TriTAC treatment.

[0485] NCI-H292 lung cancer cells were treated 100 units/mL IFNγ or were co-cultured with resting T cells from a healthy donor then treated with MSLN targeting TriTAC for 48 hours. Expression levels of PD-L1 was then measured by FACS analysis. FIG. 8 demonstrates the PD-L1 levels after treatment with MSLN targeting TriTAC or IFNγ for NCI-H292 lung cancer cells.

[0486] OVCAR8 ovarian cancer cells were treated 100 units/mL IFNγ for 48 hours. Expression levels of PD-L1 was then measured by FACS analysis. FIG. 9 demonstrates the PD-L1 levels after treatment with IFNγ for OVCAR8 ovarian cancer cells.

### Example 4: In Vivo Antitumor Activity Study of MSLN Targeting TriTAC in Combination with PD-1/PD-L1 Inhibitors

[0487] NCI-H292 cancer model: NOD.Cg-Prkd^{scid} Il2rg^{tm1Wjl}/SzJ were subcutaneously implanted with a mixture of NCI-H292 and T cells at a ratio of 1:1 of 5×10⁶ cells each. Mice were randomized on day 4 when tumors reached 180 mm³. Treatment was initiated the following day on days 5-14 by i.p. injection of vehicle, 0.5 mg/kg MSLN targeting TriTAC alone once a day, 10 mg/kg Atezolizumab alone twice weekly (on days 5, 9, 12, 16), 10 mg/kg Pembrolizumab alone twice weekly (on days 5, 9, 12, 16), 10 mg/kg Atezolizumab in combination with 0.5 mg/kg MSLN targeting TriTAC once a day, or 10 mg/kg Pembrolizumab in combination with 0.5 mg/kg MSLN targeting TriTAC once a day. Ten mice were used for each treatment group. FIG. 10 demonstrates the tumor volumes under each treatment for NCI-H292 cancer cells.

[0488] OVCAR8 ovarian cancer model: NOD.Cg-Prkd^{scid} Il2rg^{tm1Wjl}/SzJ were subcutaneously implanted with a mixture of OVCAR8 and T cells at a ratio of 2:1 (10×10⁶ OVCAR8: 5×10⁶ T cells). Mice were randomized on day 6 when tumors reached about 220 mm³. Treatment was initiated the following day by i.p. injection of vehicle; 250 μg/kg MSLN targeting TriTAC alone once a day for days 7-16, then 5 days/week for the duration of the study; 500 μg/kg MSLN targeting TriTAC alone once a day for days 7-16, then 5 days/week for the duration of the study; 10 mg/kg Atezolizumab alone twice weekly; 10 mg/kg Atezolizumab twice weekly in combination with 250 μg/kg MSLN targeting TriTAC once a day for days 7-16, then 5 days/week for the duration of the study; 10 mg/kg Atezolizumab twice weekly in combination with 250 μg/kg MSLN targeting TriTAC once a day for days 7-16, then 5 days/week for the duration of the study. Eight mice were used for each treatment group. FIG. 11 demonstrates the tumor volumes under each treatment for OVCAR8 ovarian cancer cells.

### Example 5: DLL3 Targeting TriTAC Affects PD-1/PD-L1 Expression

[0489] T cells from two donors were co-cultured with SHP-77 small cell lung cancer cells at a ratio of 10:1 and treated with DLL3 targeting TriTAC (SEQ ID NO: 3461) at 10 pM, 100 pM, and 1 nM, GFP targeting TriTAC or vehicle for 48 hrs. Expression levels of PD-1 and PD-L1 were then measured by FACS analysis. FIG. 12A demonstrates the change in PD-1 expression levels after DLL3 targeting TriTAC treatment. FIG. 12B demonstrates the change in PD-L1 expression levels after DLL3 targeting TriTAC treatment.

[0490] SHP-77 small cell lung cancer cells express elevated PD-L1 in response to IFNγ treatment in vitro: SHP-77 small cell lung cancer cells were treated with 100 units/mL IFNγ for 48 hours. Expression of PD-L1 was then measured by FACS analysis. FIG. 13 demonstrates the PD-L1 levels after treatment with IFNγ for SHP-77 small cell lung cancer cells.

### Example 6: In Vivo Antitumor Activity Study of DLL3 Targeting TriTAC in Combination with PD-1/PD-L1 Inhibitors

[0491] SHP-77 small cell lung cancer tumor model: NOD.Cg-Prkd^{scid} Il2rg^{tm1Wjl}/SzJ were subcutaneously implanted with a mixture of SHP-77 and T cells at a ratio of 2:1 (10×10⁶ SHP-77: 5×10⁶ T cells). Mice were randomized on day 7 when tumors reached ˜141 mm³. Treatment was initiated the following day on days 7-16 by i.p. injection of vehicle, 10 μg/kg DLL3 targeting TriTAC alone once a day, 10 mg/kg Pembrolizumab alone twice weekly, 10 mg/kg Atezolizumab alone twice weekly, 10 mg/kg Pembrolizumab twice weekly in combination with 10 μg/kg DLL3 targeting TriTAC once a day or 10 mg/kg Atezolizumab twice weekly in combination with 10 μg/kg DLL3 targeting TriTAC once a day. Eight mice were used for each treatment group. FIG. 14 demonstrates the tumor volumes under each treatment for SHP-77 small cell lung cancer cells.

[0492] While preferred embodiments of the present invention have been shown and described herein, it will be obvious to those skilled in the art that such embodiments are provided by way of example only. Numerous variations, changes, and substitutions will now occur to those skilled in the art without departing from the invention. It should be understood that various alternatives to the embodiments of the invention described herein may be employed in practicing the invention. It is intended that the following claims define the scope of the invention and that methods and structures within the scope of these claims and their equivalents be covered thereby.

Lengthy table referenced here
US20240084035A1-20240314-T00001
Please refer to the end of the specification for access instructions.

LENGTHY TABLES
The patent application contains a lengthy table section. A copy of the table is available in electronic form from the USPTO web site (https://seqdata.uspto.gov/?pageRequest=docDetail&DocID=US20240084035A1). An electronic copy of the table will also be available from the USPTO upon request and payment of the fee set forth in 37 CFR 1.19(b)(3).

1. A combination comprising: an immunomodulator and a half-life extended immune cell engaging protein.

2. The combination of claim 1, wherein the half-life extended immune cell engaging protein comprises an immune cell engaging domain.

3. The combination of claim 2, wherein the immune cell engaging domain comprises a natural killer (NK) cell engaging domain, a T cell engaging domain, a B cell engaging domain, a dendritic cell engaging domain, a macrophage cell engaging domain, or a combination thereof.

4. The combination of claim 3, wherein the immune cell engaging domain comprises the T cell engaging domain.

5. The combination of claim 4, wherein the T cell engaging domain binds a CD3 molecule.

6. The combination of claim 5, wherein the CD3 molecule is at least one of: a CD3γ molecule, a CD3δ molecule, or a CD3ε molecule.

7. The combination of claim 1, wherein the immunomodulator comprises an immunostimulatory antibody agonist of a co-stimulatory receptor.

8. The combination of claim 1, wherein the immunomodulator comprises an immune checkpoint modulator.

9. The combination of claim 8, wherein the immune checkpoint modulator is an antagonist of at least one of: programmed cell death 1 (PDCD1, PD1, PD-1), CD274 (CD274, PDL1, PD-L1), PD-L2, cytotoxic T-lymphocyte associated protein 4 (CTLA4, CD152), CD276 (B7H3); V-set domain containing T cell activation inhibitor 1 (VTCN1, B7H4), CD272 (B and T lymphocyte associated (BTLA)), killer cell immunoglobulin like receptor, three Ig domains and long cytoplasmic tail 1 (KIR, CD158E1), lymphocyte activating 3 (LAG3, CD223), hepatitis A virus cellular receptor 2 (HAVCR2, TIMD3, TIM3), V-set immunoregulatory receptor (VSIR, B7H5, VISTA), T cell immunoreceptor with Ig and ITIM domains (TIGIT), programmed cell death 1 ligand 2 (PDCD1LG2, PD-L2, CD273), immunoglobulin superfamily member 11 (IGSF11, VSIG3), TNFRSF14 (HVEM, CD270), TNFSF14 (HVEML), PVR related immunoglobulin domain containing (PVRIG, CD112R), galectin 9 (LGALS9), killer cell immunoglobulin like receptor, two Ig domains and long cytoplasmic tail 1 (KIR2DL1); killer cell immunoglobulin like receptor, two Ig domains and long cytoplasmic tail 2 (KIR2DL2); killer cell immunoglobulin like receptor, two Ig domains and long cytoplasmic tail 3 (KIR2DL3); and killer cell immunoglobulin like receptor, three Ig domains and long cytoplasmic tail 1 (KIR3DL1), killer cell lectin like receptor C1 (KLRC1, NKG2A, CD159A), killer cell lectin like receptor D1 (KLRD1, CD94), killer cell lectin like receptor G1 (KLRG1, CLEC15A, MAFA, 2F1), sialic acid binding Ig like lectin 7 (SIGLEC7), SIGLEC, sialic acid binding Ig like lectin 9 (SIGLEC9), CEACAM (e.g., CEACAM-1, CEACAM-3 and/or CEACAM-5), VISTA, LAIR1, CD160, 2B4, CD80, CD86, B7-H1, B7-H3 (CD276), B7-H4 (VTCN1), HVEM (TNFRSF14 or CD270), KIR, A2AR, A2BR, MHC class I, MHC class II, GAL9, adenosine, TGFR (e.g., TGFR beta), CD94/NKG2A, IDO, TDO, CD39, CD73, GARP, CD47, PVRIG, CSF1R, and NOX, or any combination thereof.

10. The combination of claim 8, wherein the immune checkpoint modulator is an antagonist of PD-1, and the antagonist of PD-1 is selected from the group consisting of: Pembrolizumab, Pidilizumab (CT-011), Spartalizumab (PDR001), Nivolumab (BMS-936558, MDX-1106), MEDI0680 (AMP-514), Cemiplimab (REGN2810), Dostarlimab (TSR-042), Sasanlimab (PF-06801591), Tislelizumab (BGB-A317), BGB-108, Tislelizumab (BGB-A317), Camrelizumab (INCSHR1210, SHR-1210), AMP-224, Zimberelimab (AB122, GLS-010, WBP-3055), AK-103 (HX-008), AK-105 (anti-PD-1 antibody), CS1003, HLX10, Retifanlimab (MGA-012), BI-754091, Balstilimab (AGEN2034), toripalimab (JS-001), cetrelimab (JNJ-63723283), genolimzumab (CBT-501), LZM009, Prolgolimab (BCD-100), Sym021, ABBV-181, BAT-1306, JTX-4014, sintilimab (IBI-308), Tebotelimab (MGD013), MGD-019, KN-046, MEDI-5752, RO7121661, XmAb20717, and AK-104.

11. The combination of claim 10, wherein the immune checkpoint modulator is Pembrolizumab.

12. The combination of claim 8, wherein the immune checkpoint modulator is an antibody that binds to PD-L1, and the antibody that binds to PD-L1 is selected from the group consisting of Atezolizumab (MPDL3280A), Avelumab (MSB0010718C), Durvalumab (MEDI-4736), Envafolimab (KN035), AUNP12, CA-170, BMS-986189, BMS-936559, Cosibelimab (CK-301), LY3300054, CX-072, CBT-502, MSB-2311, BGB-A333, SHR-1316, CS1001 (WBP3155), HLX-20, KL-A167 (HBM 9167), STI-A1014, STI-A1015 (IMC-001), BCD-135, FAZ-053, CBT-502 (TQB2450), MDX1105-01, FS-118, M7824, CDX-527, LY3415244, and INBRX-105.

13. The combination of claim 12, wherein the immune checkpoint modulator is Atezolizumab.

14. (canceled)

15. (canceled)

16. (canceled)

17. (canceled)

18. (canceled)

19. (canceled)

20. The combination of claim 8, wherein the immune checkpoint modulator comprises an immune checkpoint activator.

21. (canceled)

22. (canceled)

23. The combination of claim 2, wherein the half-life extended immune cell engaging protein comprises a first domain (A), a second domain (B), and a third domain (C), wherein:
(i) the first domain (A) is the T cell engaging domain and specifically binds to human CD3,
(ii) the second domain (B) specifically binds to human serum albumin (HSA), and
(iii) the third domain (C) specifically binds to a target antigen;
wherein the domains are linked in one of the following orders: H₂N-(C)-(B)-(A)-COOH, H₂N-(A)-(B)-(C)-COOH, H₂N-(B)-(A)-(C)-COOH, H₂N-(C)-(A)-(B)-COOH, H₂N-(A)-(C)-(B)-COOH, or H₂N-(B)-(C)-(A)-COOH, or by linkers L1 and L2 in one of the following orders: H₂N-(C)-L1-(B)-L2(A)-COOH, H₂N-(A)-L1-(B)-L2-(C)-COOH, H₂N-(B)-L1-(A)-L2-(C)-COOH, H₂N-(C)-L1-(A)-L2-(B)-COOH, H₂N-(A)-L1-(C)-L2(B)-COOH, or H₂N-(B)-L1-(C)-L2-(A)-COOH.

24. The combination of claim 23, wherein the target antigen is a tumor antigen.

25-76. (canceled)

77. A composition comprising an immunomodulator and a half-life extended immune cell engaging protein.

78-91. (canceled)

92. A method of increasing the sensitivity of a subject to a therapy, comprising administering an immune checkpoint inhibitor, the method comprising administering to the subject a half-life extended immune cell engaging protein, comprising:
(i) a first domain (A) which specifically binds to human CD3,
(ii) a second domain (B) which specifically binds to human serum albumin (HSA), and
(iii) a third domain (C) which specifically binds to a target antigen.

93. The method of claim 92, wherein the administering the half-life extended immune cell engaging protein increases the concentration of an immune checkpoint protein targeted by the immune checkpoint inhibitor in the subject.

94. The method of claim 93, wherein the immune checkpoint protein is PD-1.

95. The method of claim 92, wherein the immune checkpoint inhibitor comprises an antibody selected from the group consisting of Pembrolizumab, Pidilizumab (CT-011), Spartalizumab (PDR001), Nivolumab (BMS-936558, MDX-1106), MEDI0680 (AMP-514), Cemiplimab (REGN2810), Dostarlimab (TSR-042), Sasanlimab (PF-06801591), Tislelizumab (BGB-A317), BGB-108, Tislelizumab (BGB-A317), Camrelizumab (INCSHR1210, SHR-1210), AMP-224, Zimberelimab (AB122, GLS-010, WBP-3055), AK-103 (HX-008), AK-105, CS1003, HLX10, Retifanlimab (MGA-012), BI-754091, Balstilimab (AGEN2034), toripalimab (JS-001), cetrelimab (JNJ-63723283), genolimzumab (CBT-501, anti-PD-1 antibody), LZM009, Prolgolimab (BCD-100), Sym021, ABBV-181, BAT-1306, JTX-4014, sintilimab (IBI-308), Tebotelimab (MGD013), MGD-019, KN-046, MEDI-5752, RO7121661, XmAb20717, and AK-104.

96. (canceled)

97. A method of improving the efficacy of a therapy in a subject in need thereof, comprising administering to the subject an immunomodulator, wherein the method further comprises administering to the subject a half-life extended immune cell engaging protein.

98. The method of claim 97, wherein the immunomodulator comprises an immunostimulatory antibody agonist of a co-stimulatory receptor.

99. The method of claim 97, wherein the immunomodulator comprises an immune checkpoint modulator.

100. The method of claim 99, wherein the immune checkpoint modulator is an antagonist of at least one of: programmed cell death 1 (PDCD1, PD1, PD-1), CD274 (CD274, PDL1, PD-L1), PD-L2, cytotoxic T-lymphocyte associated protein 4 (CTLA4, CD152), CD276 (B7H3); V-set domain containing T cell activation inhibitor 1 (VTCN1, B7H4), CD272 (B and T lymphocyte associated (BTLA)), killer cell immunoglobulin like receptor, three Ig domains and long cytoplasmic tail 1 (KIR, CD158E1), lymphocyte activating 3 (LAG3, CD223), hepatitis A virus cellular receptor 2 (HAVCR2, TEID3, TIM3), V-set immunoregulatory receptor (VSIR, B7H5, VISTA), T cell immunoreceptor with Ig and ITIM domains (TIGIT), programmed cell death 1 ligand 2 (PDCDILG2, PD-L2, CD273), immunoglobulin superfamily member 11 (IGSF11, VSIG3), TNFRSF14 (HVEM, CD270), TNFSF14 (HVEML), PVR related immunoglobulin domain containing (PVRIG, CD112R), galectin 9 (LGALS9), killer cell immunoglobulin like receptor, two Ig domains and long cytoplasmic tail 1 (KIR2DL1); killer cell immunoglobulin like receptor, two Ig domains and long cytoplasmic tail 2 (KIR2DL2); killer cell immunoglobulin like receptor, two Ig domains and long cytoplasmic tail 3 (KIR2DL3); a killer cell immunoglobulin like receptor, three Ig domains and long cytoplasmic tail 1 (KIR3DL1), killer cell lectin like receptor C1 (KLRC1, NKG2A, CD159A), killer cell lectin like receptor D1 (KLRD1, CD94), killer cell lectin like receptor G1 (KLRG1, CLEC15A, MAFA, 2F1), sialic acid binding Ig like lectin 7 (SIGLEC7), SIGLEC, sialic acid binding Ig like lectin 9 (SIGLEC9), CEACAM (e.g., CEACAM-1, CEACAM-3 and/or CEACAM-5), VISTA, LAIR1, CD160, 2B4, CD80, CD86, B7-H1, B7-H3 (CD276), B7-H4 (VTCN1), HVEM (TNFRSF14 or CD270), KIR, A2AR, A2BR, MHC class I, MHC class II, GAL9, adenosine, TGFR (e.g., TGFR beta), CD94/NKG2A, IDO, TDO, CD39, CD73, GARP, CD47, PVRIG, CSF1R, and NOX, or any combination thereof.

101. The method of claim 99, wherein the immune checkpoint modulator is an antagonist of PD-1, and the antagonist of PD-1 is selected from the group consisting of Pembrolizumab, Pidilizumab (CT-011), Spartalizumab (PDR001), Nivolumab (BMS-936558, MDX-1106), MEDI0680 (AMP-514), Cemiplimab (REGN2810), Dostarlimab (TSR-042), Sasanlimab (PF-06801591), Tislelizumab (BGB-A317), BGB-108, Tislelizumab (BGB-A317), Camrelizumab (INCSHR1210, SHR-1210), AMP-224, Zimberelimab (AB122, GLS-010, WBP-3055), AK-103 (HX-008), AK-105, CS1003, HLX10, Retifanlimab (MGA-012), BI-754091, Balstilimab (AGEN2034), toripalimab (JS-001), cetrelimab (JNJ-63723283), genolimzumab (CBT-501), LZM009, Prolgolimab (BCD-100), Sym021, ABBV-181, BAT-1306, JTX-4014, sintilimab (IBI-308), Tebotelimab (MGD013), MGD-019, KN-046, MEDI-5752, RO7121661, XmAb20717, and AK-104.

102. The method of claim 101, wherein the immune checkpoint modulator is Pembrolizumab.

103. The method of claim 99, wherein the immune checkpoint modulator is an antibody that binds to PD-L1, and the antibody that binds to PD-L1 is selected from the group consisting of Atezolizumab (MPDL3280A), Avelumab (MSB0010718C), Durvalumab (MEDI-4736), Envafolimab (KN035), AUNP12, CA-170, BMS-986189, BMS-936559, Cosibelimab (CK-301), LY3300054, CX-072, CBT-502, MSB-2311, BGB-A333, SHR-1316, CS1001 (WBP3155), HLX-20, KL-A167 (HBM 9167), STI-A1014, STI-A1015 (IMC-001), BCD-135, FAZ-053, CBT-502 (TQB2450), MDX1105-01, FS-118, M7824, CDX-527, LY3415244, and INBRX-105.

104. The method of claim 103, wherein the immune checkpoint modulator is Atezolizumab.

105-124. (canceled)

The application's sequence listing, which the Patent Office published only in electronic form, follows.

SEQUENCE LISTING (3529 sequences)

SEQ ID NO: 1 - protein, 10 aa, synthetic construct
  REGION 1..10: note = Description of Artificial Sequence: Synthetic peptide
TDIFSISPMG

SEQ ID NO: 2 - protein, 10 aa, synthetic construct
  REGION 1..10: note = Description of Artificial Sequence: Synthetic peptide
TNIFSSSPMG

SEQ ID NO: 3 - protein, 10 aa, synthetic construct
  REGION 1..10: note = Description of Artificial Sequence: Synthetic peptide
TNIFSISPGG

SEQ ID NO: 4 - protein, 10 aa, synthetic construct
  REGION 1..10: note = Description of Artificial Sequence: Synthetic peptide
TNIFMISPMG

SEQ ID NO: 5 - protein, 10 aa, synthetic construct
  REGION 1..10: note = Description of Artificial Sequence: Synthetic peptide
TNIFSSSPMG

SEQ ID NO: 6 - protein, 10 aa, synthetic construct
  REGION 1..10: note = Description of Artificial Sequence: Synthetic peptide
TNIFSIRPMG

SEQ ID NO: 7 - protein, 10 aa, synthetic construct
  REGION 1..10: note = Description of Artificial Sequence: Synthetic peptide
TNISSISPMG

SEQ ID NO: 8 - protein, 10 aa, synthetic construct
  REGION 1..10: note = Description of Artificial Sequence: Synthetic peptide
TNIFSSSPMG

SEQ ID NO: 9 - protein, 10 aa, synthetic construct
  REGION 1..10: note = Description of Artificial Sequence: Synthetic peptide
TNIFSITPMG

SEQ ID NO: 10 - protein, 10 aa, synthetic construct
  REGION 1..10: note = Description of Artificial Sequence: Synthetic peptide
TNIPSISPMG

SEQ ID NO: 11 - protein, 10 aa, synthetic construct
  REGION 1..10: note = Description of Artificial Sequence: Synthetic peptide
TNITSISPMG

SEQ ID NO: 12 - protein, 10 aa, synthetic construct
  REGION 1..10: note = Description of Artificial Sequence: Synthetic peptide
TNIFSKSPMG

SEQ ID NO: 13 - protein, 10 aa, synthetic construct
  REGION 1..10: note = Description of Artificial Sequence: Synthetic peptide
TNDFSISPMG

SEQ ID NO: 14 - protein, 10 aa, synthetic construct
  REGION 1..10: note = Description of Artificial Sequence: Synthetic peptide
TNITSISPMG

SEQ ID NO: 15 - protein, 10 aa, synthetic construct
  REGION 1..10: note = Description of Artificial Sequence: Synthetic peptide
TNIFSISPMG

SEQ ID NO: 16 - protein, 10 aa, synthetic construct
  REGION 1..10: note = Description of Artificial Sequence: Synthetic peptide
TNIFSRSPMG

SEQ ID NO: 17 - protein, 10 aa, synthetic construct
  REGION 1..10: note = Description of Artificial Sequence: Synthetic peptide
TNIESISPMG

SEQ ID NO: 18 - protein, 10 aa, synthetic construct
  REGION 1..10: note = Description of Artificial Sequence: Synthetic peptide
SNIFSISPMG

SEQ ID NO: 19 - protein, 10 aa, synthetic construct
  REGION 1..10: note = Description of Artificial Sequence: Synthetic peptide
TNIFSTSPMG

SEQ ID NO: 20 - protein, 10 aa, synthetic construct
  REGION 1..10: note = Description of Artificial Sequence: Synthetic peptide
TNIVSISPMG

SEQ ID NO: 21 - protein, 10 aa, synthetic construct
  REGION 1..10: note = Description of Artificial Sequence: Synthetic peptide
TNIESISPMG

SEQ ID NO: 22 - protein, 10 aa, synthetic construct
  REGION 1..10: note = Description of Artificial Sequence: Synthetic peptide
TNIPSISPMG

SEQ ID NO: 23 - protein, 10 aa, synthetic construct
  REGION 1..10: note = Description of Artificial Sequence: Synthetic peptide
TNIFSSSPMG

SEQ ID NO: 24 - protein, 10 aa, synthetic construct
  REGION 1..10: note = Description of Artificial Sequence: Synthetic peptide
TNIFSISPMG

SEQ ID NO: 25 - protein, 10 aa, synthetic construct
  REGION 1..10: note = Description of Artificial Sequence: Synthetic peptide
TNIFSIYPMG

SEQ ID NO: 26 - protein, 10 aa, synthetic construct
  REGION 1..10: note = Description of Artificial Sequence: Synthetic peptide
TNIFSNSPMG

SEQ ID NO: 27 - protein, 10 aa, synthetic construct
  REGION 1..10: note = Description of Artificial Sequence: Synthetic peptide
TNISSISPMG

SEQ ID NO: 28 - protein, 10 aa, synthetic construct
  REGION 1..10: note = Description of Artificial Sequence: Synthetic peptide
TNIVSISPMG

SEQ ID NO: 29 - protein, 10 aa, synthetic construct
  REGION 1..10: note = Description of Artificial Sequence: Synthetic peptide
TNIFSNSPMG

SEQ ID NO: 30 - protein, 10 aa, synthetic construct
  REGION 1..10: note = Description of Artificial Sequence: Synthetic peptide
TNITSISPMG

SEQ ID NO: 31 - protein, 10 aa, synthetic construct
  REGION 1..10: note = Description of Artificial Sequence: Synthetic peptide
TNIFSDSPMG

SEQ ID NO: 32 - protein, 10 aa, synthetic construct
  REGION 1..10: note = Description of Artificial Sequence: Synthetic peptide
TNIFSRSPMG

SEQ ID NO: 33 - protein, 10 aa, synthetic construct
  REGION 1..10: note = Description of Artificial Sequence: Synthetic peptide
TNIFSASPMG

SEQ ID NO: 34 - protein, 10 aa, synthetic construct
  REGION 1..10: note = Description of Artificial Sequence: Synthetic peptide
TNIFSASPMG

SEQ ID NO: 35 - protein, 10 aa, synthetic construct
  REGION 1..10: note = Description of Artificial Sequence: Synthetic peptide
TNITSISPMG

SEQ ID NO: 36 - protein, 10 aa, synthetic construct
  REGION 1..10: note = Description of Artificial Sequence: Synthetic peptide
TNIASISPMG

SEQ ID NO: 37 - protein, 10 aa, synthetic construct
  REGION 1..10: note = Description of Artificial Sequence: Synthetic peptide
TNIFSRSPMG

SEQ ID NO: 38 - protein, 10 aa, synthetic construct
  REGION 1..10: note = Description of Artificial Sequence: Synthetic peptide
TNIFSLSPMG

SEQ ID NO: 39 - protein, 10 aa, synthetic construct
  REGION 1..10: note = Description of Artificial Sequence: Synthetic peptide
TNIPSISPMG

SEQ ID NO: 40 - protein, 10 aa, synthetic construct
  REGION 1..10: note = Description of Artificial Sequence: Synthetic peptide
TNIFSQSPMG

SEQ ID NO: 41 - protein, 10 aa, synthetic construct
  REGION 1..10: note = Description of Artificial Sequence: Synthetic peptide
TNIESISPMG

SEQ ID NO: 42 - protein, 10 aa, synthetic construct
  REGION 1..10: note = Description of Artificial Sequence: Synthetic peptide
TNIFSHSPMG

SEQ ID NO: 43 - protein, 10 aa, synthetic construct
  REGION 1..10: note = Description of Artificial Sequence: Synthetic peptide
TNIFSESPMG

SEQ ID NO: 44 - protein, 10 aa, synthetic construct
  REGION 1..10: note = Description of Artificial Sequence: Synthetic peptide
TNIDSISPMG

SEQ ID NO: 45 - protein, 10 aa, synthetic construct
  REGION 1..10: note = Description of Artificial Sequence: Synthetic peptide
TNIFSSSPMG

SEQ ID NO: 46 - protein, 10 aa, synthetic construct
  REGION 1..10: note = Description of Artificial Sequence: Synthetic peptide
TNIFSTSPMG

SEQ ID NO: 47 - protein, 10 aa, synthetic construct
  REGION 1..10: note = Description of Artificial Sequence: Synthetic peptide
TNITSVSPMG

SEQ ID NO: 48 - protein, 10 aa, synthetic construct
  REGION 1..10: note = Description of Artificial Sequence: Synthetic peptide
TNISSISPMG

SEQ ID NO: 49 - protein, 10 aa, synthetic construct
  REGION 1..10: note = Description of Artificial Sequence: Synthetic peptide
SNIFSISPMG

SEQ ID NO: 50 - protein, 10 aa, synthetic construct
  REGION 1..10: note = Description of Artificial Sequence: Synthetic peptide
TNIFRISPMG

SEQ ID NO: 51 - protein, 10 aa, synthetic construct
  REGION 1..10: note = Description of Artificial Sequence: Synthetic peptide
TNIVSISPMG

SEQ ID NO: 52 - protein, 10 aa, synthetic construct
  REGION 1..10: note = Description of Artificial Sequence: Synthetic peptide
TNIDSISPMG

SEQ ID NO: 53 - protein, 10 aa, synthetic construct
  REGION 1..10: note = Description of Artificial Sequence: Synthetic peptide
TNIFSRSPMG

SEQ ID NO: 54 - protein, 10 aa, synthetic construct
  REGION 1..10: note = Description of Artificial Sequence: Synthetic peptide
TNIQSISPMG

SEQ ID NO: 55 - protein, 10 aa, synthetic construct
  REGION 1..10: note = Description of Artificial Sequence: Synthetic peptide
TNIFNISPMG

SEQ ID NO: 56 - protein, 10 aa, synthetic construct
  REGION 1..10: note = Description of Artificial Sequence: Synthetic peptide
TNEFSISPMG

SEQ ID NO: 57 - protein, 10 aa, synthetic construct
  REGION 1..10: note = Description of Artificial Sequence: Synthetic peptide
TNIPSISPMG

SEQ ID NO: 58 - protein, 10 aa, synthetic construct
  REGION 1..10: note = Description of Artificial Sequence: Synthetic peptide
TNIGSISPMG

SEQ ID NO: 59 - protein, 10 aa, synthetic construct
  REGION 1..10: note = Description of Artificial Sequence: Synthetic peptide
TNIFSKSPMG

SEQ ID NO: 60 - protein, 10 aa, synthetic construct
  REGION 1..10: note = Description of Artificial Sequence: Synthetic peptide
TNIFSITPMG

SEQ ID NO: 61 - protein, 10 aa, synthetic construct
  REGION 1..10: note = Description of Artificial Sequence: Synthetic peptide
TSDFSISPMG

SEQ ID NO: 62 - protein, 10 aa, synthetic construct
  REGION 1..10: note = Description of Artificial Sequence: Synthetic peptide
TNIMSISPMG

SEQ ID NO: 63 - protein, 10 aa, synthetic construct
  REGION 1..10: note = Description of Artificial Sequence: Synthetic peptide
TNIMSISPMG

SEQ ID NO: 64 - protein, 10 aa, synthetic construct
  REGION 1..10: note = Description of Artificial Sequence: Synthetic peptide
TNIPSISPMG

SEQ ID NO: 65 - protein, 10 aa, synthetic construct
  REGION 1..10: note = Description of Artificial Sequence: Synthetic peptide
TNIFSTSPMG

SEQ ID NO: 66 - protein, 10 aa, synthetic construct
  REGION 1..10: note = Description of Artificial Sequence: Synthetic peptide
TNIFSQSPMG

SEQ ID NO: 67 - protein, 10 aa, synthetic construct
  REGION 1..10: note = Description of Artificial Sequence: Synthetic peptide
TNIASISPMG

SEQ ID NO: 68 - protein, 10 aa, synthetic construct
  REGION 1..10: note = Description of Artificial Sequence: Synthetic peptide
TNIFSKSPMG

SEQ ID NO: 69 - protein, 10 aa, synthetic construct
  REGION 1..10: note = Description of Artificial Sequence: Synthetic peptide
TNIFSRSPMG

SEQ ID NO: 70 - protein, 10 aa, synthetic construct
  REGION 1..10: note = Description of Artificial Sequence: Synthetic peptide
TNHFSISPMG

SEQ ID NO: 71 - protein, 10 aa, synthetic construct
  REGION 1..10: note = Description of Artificial Sequence: Synthetic peptide
TNIFSNSPMG

SEQ ID NO: 72 - protein, 10 aa, synthetic construct
  REGION 1..10: note = Description of Artificial Sequence: Synthetic peptide
TNIFSTSPMG

SEQ ID NO: 73 - protein, 10 aa, synthetic construct
  REGION 1..10: note = Description of Artificial Sequence: Synthetic peptide
TNIFSISPYG

SEQ ID NO: 74 - protein, 10 aa, synthetic construct
  REGION 1..10: note = Description of Artificial Sequence: Synthetic peptide
TNIFSNSPMG

SEQ ID NO: 75 - protein, 10 aa, synthetic construct
  REGION 1..10: note = Description of Artificial Sequence: Synthetic peptide
TNIFSSSPMG

SEQ ID NO: 76 - protein, 10 aa, synthetic construct
  REGION 1..10: note = Description of Artificial Sequence: Synthetic peptide
TNIVSISPMG

SEQ ID NO: 77 - protein, 10 aa, synthetic construct
  REGION 1..10: note = Description of Artificial Sequence: Synthetic peptide
TNISSISPMG

SEQ ID NO: 78 - protein, 10 aa, synthetic construct
  REGION 1..10: note = Description of Artificial Sequence: Synthetic peptide
TNIISISPMG

SEQ ID NO: 79 - protein, 10 aa, synthetic construct
  REGION 1..10: note = Description of Artificial Sequence: Synthetic peptide
TNIASISPMG

SEQ ID NO: 80 - protein, 10 aa, synthetic construct
  REGION 1..10: note = Description of Artificial Sequence: Synthetic peptide
TNIFSESPMG

SEQ ID NO: 81 - protein, 10 aa, synthetic construct
  REGION 1..10: note = Description of Artificial Sequence: Synthetic peptide
TNIFSTSPMG

SEQ ID NO: 82 - protein, 10 aa, synthetic construct
  REGION 1..10: note = Description of Artificial Sequence: Synthetic peptide
TNISSISPMG

SEQ ID NO: 83 - protein, 10 aa, synthetic construct
  REGION 1..10: note = Description of Artificial Sequence: Synthetic peptide
TNVVSISPMG

SEQ ID NO: 84 - protein, 10 aa, synthetic construct
  REGION 1..10: note = Description of Artificial Sequence: Synthetic peptide
TNEFSISPMG

SEQ ID NO: 85 - protein, 10 aa, synthetic construct
  REGION 1..10: note = Description of Artificial Sequence: Synthetic peptide
TNIFSNSPMG

SEQ ID NO: 86 - protein, 10 aa, synthetic construct
  REGION 1..10: note = Description of Artificial Sequence: Synthetic peptide
TNIFSRSPMG

SEQ ID NO: 87 - protein, 10 aa, synthetic construct
  REGION 1..10: note = Description of Artificial Sequence: Synthetic peptide
TNIFSDSPMG

SEQ ID NO: 88 - protein, 10 aa, synthetic construct
  REGION 1..10: note = Description of Artificial Sequence: Synthetic peptide
TNDFSISPMG

SEQ ID NO: 89 - protein, 10 aa, synthetic construct
  REGION 1..10: note = Description of Artificial Sequence: Synthetic peptide
TNIFSKSPMG

SEQ ID NO: 90 - protein, 10 aa, synthetic construct
  REGION 1..10: note = Description of Artificial Sequence: Synthetic peptide
TNIFSIYPMG

SEQ ID NO: 91 - protein, 10 aa, synthetic construct
  REGION 1..10: note = Description of Artificial Sequence: Synthetic peptide
TNIFSSSPMG

SEQ ID NO: 92 - protein, 10 aa, synthetic construct
  REGION 1..10: note = Description of Artificial Sequence: Synthetic peptide
TNIFSVSPMG

SEQ ID NO: 93 - protein, 10 aa, synthetic construct
  REGION 1..10: note = Description of Artificial Sequence: Synthetic peptide
TNIFSITPMG

SEQ ID NO: 94 - protein, 10 aa, synthetic construct
  REGION 1..10: note = Description of Artificial Sequence: Synthetic peptide
TNIESISPMG

SEQ ID NO: 95 - protein, 10 aa, synthetic construct
  REGION 1..10: note = Description of Artificial Sequence: Synthetic peptide
TNIFSTSPMG

SEQ ID NO: 96 - protein, 10 aa, synthetic construct
  REGION 1..10: note = Description of Artificial Sequence: Synthetic peptide
TNIESISPMG

SEQ ID NO: 97 - protein, 10 aa, synthetic construct
  REGION 1..10: note = Description of Artificial Sequence: Synthetic peptide
TNIFSINPMG

SEQ ID NO: 98 - protein, 10 aa, synthetic construct
  REGION 1..10: note = Description of Artificial Sequence: Synthetic peptide
TNIFSITPMG

SEQ ID NO: 99 - protein, 10 aa, synthetic construct
  REGION 1..10: note = Description of Artificial Sequence: Synthetic peptide
TNITSISPMG

SEQ ID NO: 100 - protein, 10 aa, synthetic construct
  REGION 1..10: note = Description of Artificial Sequence: Synthetic peptide
TNIFSGSPMG

SEQ ID NO: 101 - protein, 10 aa, synthetic construct
  REGION 1..10: note = Description of Artificial Sequence: Synthetic peptide
TNIFSITPMG

SEQ ID NO: 102 - protein, 10 aa, synthetic construct
  REGION 1..10: note = Description of Artificial Sequence: Synthetic peptide
TNIDSISPMG

SEQ ID NO: 103 - protein, 10 aa, synthetic construct
  REGION 1..10: note = Description of Artificial Sequence: Synthetic peptide
TNIFSDSPMG

SEQ ID NO: 104 - protein, 10 aa, synthetic construct
  REGION 1..10: note = Description of Artificial Sequence: Synthetic peptide
TNIDSISPMG

SEQ ID NO: 105 - protein, 10 aa, synthetic construct
  REGION 1..10: note = Description of Artificial Sequence: Synthetic peptide
TNIFSKSPMG

SEQ ID NO: 106 - protein, 10 aa, synthetic construct
  REGION 1..10: note = Description of Artificial Sequence: Synthetic peptide
TNIFSVSPMG

SEQ ID NO: 107 - protein, 10 aa, synthetic construct
  REGION 1..10: note = Description of Artificial Sequence: Synthetic peptide
TNQFSISPMG

SEQ ID NO: 108 - protein, 10 aa, synthetic construct
  REGION 1..10: note = Description of Artificial Sequence: Synthetic peptide
TNIRSISPMG

SEQ ID NO: 109 - protein, 10 aa, synthetic construct
  REGION 1..10: note = Description of Artificial Sequence: Synthetic peptide
TNIFSRSPMG

SEQ ID NO: 110 - protein, 10 aa, synthetic construct
  REGION 1..10: note = Description of Artificial Sequence: Synthetic peptide
TNITSISPMG

SEQ ID NO: 111 - protein, 10 aa, synthetic construct
  REGION 1..10: note = Description of Artificial Sequence: Synthetic peptide
TNIFSTSPYG

SEQ ID NO: 112 - protein, 10 aa, synthetic construct
  REGION 1..10: note = Description of Artificial Sequence: Synthetic peptide
TNIFSTSPGG

SEQ ID NO: 113 - protein, 10 aa, synthetic construct
  REGION 1..10: note = Description of Artificial Sequence: Synthetic peptide
TNIFSITPYG

SEQ ID NO: 114 - protein, 10 aa, synthetic construct
  REGION 1..10: note = Description of Artificial Sequence: Synthetic peptide
TNIFSITPGG

SEQ ID NO: 115 - protein, 10 aa, synthetic construct
  REGION 1..10: note = Description of Artificial Sequence: Synthetic peptide
TNIFSISPMG

SEQ ID NO: 116 - protein, 14 aa, synthetic construct
  REGION 1..14: note = Description of Artificial Sequence: Synthetic peptide
AIHGGSTLYADSVK

SEQ ID NO: 117 - protein, 14 aa, synthetic construct
  REGION 1..14: note = Description of Artificial Sequence: Synthetic peptide
AINGFSTLYADSVK

SEQ ID NO: 118 - protein, 14 aa, synthetic construct
  REGION 1..14: note = Description of Artificial Sequence: Synthetic peptide
AIHGSSTLYADSVK

SEQ ID NO: 119 - protein, 14 aa, synthetic construct
  REGION 1..14: note = Description of Artificial Sequence: Synthetic peptide
AIHGDSTLYADSVK

SEQ ID NO: 120 - protein, 14 aa, synthetic construct
  REGION 1..14: note = Description of Artificial Sequence: Synthetic peptide
AIHGFSTLYADSVK

SEQ ID NO: 121 - protein, 14 aa, synthetic construct
  REGION 1..14: note = Description of Artificial Sequence: Synthetic peptide
AIHGFSTVYADSVK

SEQ ID NO: 122 - protein, 14 aa, synthetic construct
  REGION 1..14: note = Description of Artificial Sequence: Synthetic peptide
AIHGTSTLYADSVK

SEQ ID NO: 123 - protein, 14 aa, synthetic construct
  REGION 1..14: note = Description of Artificial Sequence: Synthetic peptide
AIHGESTLYADSVK

SEQ ID NO: 124 - protein, 14 aa, synthetic construct
  REGION 1..14: note = Description of Artificial Sequence: Synthetic peptide
AIHGRSTLYADSVK

SEQ ID NO: 125 - protein, 14 aa, synthetic construct
  REGION 1..14: note = Description of Artificial Sequence: Synthetic peptide
AIHGESTLYADSVK

SEQ ID NO: 126 - protein, 14 aa, synthetic construct
  REGION 1..14: note = Description of Artificial Sequence: Synthetic peptide
AISGFSTLYADSVK

SEQ ID NO: 127 - protein, 14 aa, synthetic construct
  REGION 1..14: note = Description of Artificial Sequence: Synthetic peptide
AIHGKSTLYADSVK

SEQ ID NO: 128 - protein, 14 aa, synthetic construct
  REGION 1..14: note = Description of Artificial Sequence: Synthetic peptide
AIHGKSTLYADSVK

SEQ ID NO: 129 - protein, 14 aa, synthetic construct
  REGION 1..14: note = Description of Artificial Sequence: Synthetic peptide
AIHGFETLYADSVK

SEQ ID NO: 130 - protein, 14 aa, synthetic construct
  REGION 1..14: note = Description of Artificial Sequence: Synthetic peptide
AIHGDSTLYADSVK

SEQ ID NO: 131 - protein, 14 aa, synthetic construct
  REGION 1..14: note = Description of Artificial Sequence: Synthetic peptide
AIHGNSTLYADSVK

SEQ ID NO: 132 - protein, 14 aa, synthetic construct
  REGION 1..14: note = Description of Artificial Sequence: Synthetic peptide
AIHGSSTLYADSVK

SEQ ID NO: 133 - protein, 14 aa, synthetic construct
  REGION 1..14: note = Description of Artificial Sequence: Synthetic peptide
AIHGSSTLYADSVK

SEQ ID NO: 134 - protein, 14 aa, synthetic construct
  REGION 1..14: note = Description of Artificial Sequence: Synthetic peptide
AIHGFQTLYADSVK

SEQ ID NO: 135 - protein, 14 aa, synthetic construct
  REGION 1..14: note = Description of Artificial Sequence: Synthetic peptide
AIHGHSTLYADSVK

SEQ ID NO: 136 - protein, 14 aa, synthetic construct
  REGION 1..14: note = Description of Artificial Sequence: Synthetic peptide
AIHGNSTLYADSVK

SEQ ID NO: 137 - protein, 14 aa, synthetic construct
  REGION 1..14: note = Description of Artificial Sequence: Synthetic peptide
AIHGDSTLYADSVK

SEQ ID NO: 138 - protein, 14 aa, synthetic construct
  REGION 1..14: note = Description of Artificial Sequence: Synthetic peptide
AIHGFKTLYADSVK

SEQ ID NO: 139 - protein, 14 aa, synthetic construct
  REGION 1..14: note = Description of Artificial Sequence: Synthetic peptide
AIHGDSTLYADSVK

SEQ ID NO: 140 - protein, 14 aa, synthetic construct
  REGION 1..14: note = Description of Artificial Sequence: Synthetic peptide
AIHGFSTYYADSVK

SEQ ID NO: 141 - protein, 14 aa, synthetic construct
  REGION 1..14: note = Description of Artificial Sequence: Synthetic peptide
AIHGGSTLYADSVK

SEQ ID NO: 142 - protein, 14 aa, synthetic construct
  REGION 1..14: note = Description of Artificial Sequence: Synthetic peptide
AIHGFSTLYADSVK

SEQ ID NO: 143 - protein, 14 aa, synthetic construct
  REGION 1..14: note = Description of Artificial Sequence: Synthetic peptide
AIHGKSTLYADSVK

SEQ ID NO: 144 - protein, 14 aa, synthetic construct
  REGION 1..14: note = Description of Artificial Sequence: Synthetic peptide
AIHGDSTLYADSVK

SEQ ID NO: 145 - protein, 14 aa, synthetic construct
  REGION 1..14: note = Description of Artificial Sequence: Synthetic peptide
AIHGVSTLYADSVK

SEQ ID NO: 146 - protein, 14 aa, synthetic construct
  REGION 1..14: note = Description of Artificial Sequence: Synthetic peptide
AIHGTSTLYADSVK

SEQ ID NO: 147 - protein, 14 aa, synthetic construct
  REGION 1..14: note = Description of Artificial Sequence: Synthetic peptide
AIHGDSTLYADSVK

SEQ ID NO: 148 - protein, 14 aa, synthetic construct
  REGION 1..14: note = Description of Artificial Sequence: Synthetic peptide
AIHGSSTLYADSVK

SEQ ID NO: 149 - protein, 14 aa, synthetic construct
  REGION 1..14: note = Description of Artificial Sequence: Synthetic peptide
AIHGSSTLYADSVK

SEQ ID NO: 150 - protein, 14 aa, synthetic construct
  REGION 1..14: note = Description of Artificial Sequence: Synthetic peptide
AIHGDSTLYADSVK

SEQ ID NO: 151 - protein, 14 aa, synthetic construct
  REGION 1..14: note = Description of Artificial Sequence: Synthetic peptide
AIHGTSTLYADSVK

SEQ ID NO: 152 - protein, 14 aa, synthetic construct
  REGION 1..14: note = Description of Artificial Sequence: Synthetic peptide
AIHGTSTLYADSVK

SEQ ID NO: 153 - protein, 14 aa, synthetic construct
  REGION 1..14: note = Description of Artificial Sequence: Synthetic peptide
AIHGDSTLYADSVK

SEQ ID NO: 154 - protein, 14 aa, synthetic construct
  REGION 1..14: note = Description of Artificial Sequence: Synthetic peptide
AIHGQSTLYADSVK

SEQ ID NO: 155 - protein, 14 aa, synthetic construct
  REGION 1..14: note = Description of Artificial Sequence: Synthetic peptide
AIHGDSTLYADSVK

SEQ ID NO: 156 - protein, 14 aa, synthetic construct
  REGION 1..14: note = Description of Artificial Sequence: Synthetic peptide
AIHGKSTLYADSVK

SEQ ID NO: 157 - protein, 14 aa, synthetic construct
  REGION 1..14: note = Description of Artificial Sequence: Synthetic peptide
AIHGTSTLYADSVK

SEQ ID NO: 158 - protein, 14 aa, synthetic construct
  REGION 1..14: note = Description of Artificial Sequence: Synthetic peptide
AIHGNSTLYADSVK

SEQ ID NO: 159 - protein, 14 aa, synthetic construct
  REGION 1..14: note = Description of Artificial Sequence: Synthetic peptide
AIHGFQTLYADSVK

SEQ ID NO: 160 - protein, 14 aa, synthetic construct
  REGION 1..14: note = Description of Artificial Sequence: Synthetic peptide
AIHGFSTWYADSVK

SEQ ID NO: 161 - protein, 14 aa, synthetic construct
  REGION 1..14: note = Description of Artificial Sequence: Synthetic peptide
AIHGFSTIYADSVK

SEQ ID NO: 162 - protein, 14 aa, synthetic construct
  REGION 1..14: note = Description of Artificial Sequence: Synthetic peptide
AIHGPSTLYADSVK

SEQ ID NO: 163 - protein, 14 aa, synthetic construct
  REGION 1..14: note = Description of Artificial Sequence: Synthetic peptide
AIHGHSTLYADSVK

SEQ ID NO: 164 - protein, 14 aa, synthetic construct
  REGION 1..14: note = Description of Artificial Sequence: Synthetic peptide
AIHGESTLYADSVK

SEQ ID NO: 165 - protein, 14 aa, synthetic construct
  REGION 1..14: note = Description of Artificial Sequence: Synthetic peptide
AIHGDSTLYADSVK

SEQ ID NO: 166 - protein, 14 aa, synthetic construct
  REGION 1..14: note = Description of Artificial Sequence: Synthetic peptide
AIHGDSTLYADSVK

SEQ ID NO: 167 - protein, 14 aa, synthetic construct
  REGION 1..14: note = Description of Artificial Sequence: Synthetic peptide
AIHGNSTLYADSVK

SEQ ID NO: 168 - protein, 14 aa, synthetic construct
  REGION 1..14: note = Description of Artificial Sequence: Synthetic peptide
AIHGFETLYADSVK

SEQ ID NO: 169 - protein, 14 aa, synthetic construct
  REGION 1..14: note = Description of Artificial Sequence: Synthetic peptide
AIHGFETLYADSVK

SEQ ID NO: 170 - protein, 14 aa, synthetic construct
  REGION 1..14: note = Description of Artificial Sequence: Synthetic peptide
AIHGFSTYYADSVK

SEQ ID NO: 171 - protein, 14 aa, synthetic construct
  REGION 1..14: note = Description of Artificial Sequence: Synthetic peptide
AIHGLSTLYADSVK

SEQ ID NO: 172 - protein, 14 aa, synthetic construct
  REGION 1..14: note = Description of Artificial Sequence: Synthetic peptide
AIHGASTLYADSVK

SEQ ID NO: 173 - protein, 14 aa, synthetic construct
  REGION 1..14: note = Description of Artificial Sequence: Synthetic peptide
AIHGQSTLYADSVK

SEQ ID NO: 174 - protein, 14 aa, synthetic construct
  REGION 1..14: note = Description of Artificial Sequence: Synthetic peptide
AIHGQSTLYADSVK

SEQ ID NO: 175 - protein, 14 aa, synthetic construct
  REGION 1..14: note = Description of Artificial Sequence: Synthetic peptide
AIHGTSTLYADSVK

SEQ ID NO: 176 - protein, 14 aa, synthetic construct
  REGION 1..14: note = Description of Artificial Sequence: Synthetic peptide
AIHGFETLYADSVK

SEQ ID NO: 177 - protein, 14 aa, synthetic construct
  REGION 1..14: note = Description of Artificial Sequence: Synthetic peptide
AIHGFSTVYADSVK

SEQ ID NO: 178 - protein, 14 aa, synthetic construct
  REGION 1..14: note = Description of Artificial Sequence: Synthetic peptide
AIHGNSTLYADSVK

SEQ ID NO: 179 - protein, 14 aa, synthetic construct
  REGION 1..14: note = Description of Artificial Sequence: Synthetic peptide
AIHGESTLYADSVK

SEQ ID NO: 180 - protein, 14 aa, synthetic construct
  REGION 1..14: note = Description of Artificial Sequence: Synthetic peptide
AIHGFSTLYADSVK

SEQ ID NO: 181 - protein, 14 aa, synthetic construct
  REGION 1..14: note = Description of Artificial Sequence: Synthetic peptide
AIHGKSTLYADSVK

SEQ ID NO: 182 - protein, 14 aa, synthetic construct
  REGION 1..14: note = Description of Artificial Sequence: Synthetic peptide
AIHGKSTLYADSVK

SEQ ID NO: 183 - protein, 14 aa, synthetic construct
  REGION 1..14: note = Description of Artificial Sequence: Synthetic peptide
AIHGNSTLYADSVK

SEQ ID NO: 184 - protein, 14 aa, synthetic construct
  REGION 1..14: note = Description of Artificial Sequence: Synthetic peptide
AIHGESTLYADSVK

SEQ ID NO: 185 - protein, 14 aa, synthetic construct
  REGION 1..14: note = Description of Artificial Sequence: Synthetic peptide
AIHGSSTLYADSVK

SEQ ID NO: 186 - protein, 14 aa, synthetic construct
  REGION 1..14: note = Description of Artificial Sequence: Synthetic peptide
AIHGRSTLYADSVK

SEQ ID NO: 187 - protein, 14 aa, synthetic construct
  REGION 1..14: note = Description of Artificial Sequence: Synthetic peptide
AIHGFSTIYADSVK

SEQ ID NO: 188 - protein, 14 aa, synthetic construct
  REGION 1..14: note = Description of Artificial Sequence: Synthetic peptide
AIHGTSTLYADSVK

SEQ ID NO: 189 - protein, 14 aa, synthetic construct
  REGION 1..14: note = Description of Artificial Sequence: Synthetic peptide
AIHGFSTLYADSVK

SEQ ID NO: 190 - protein, 14 aa, synthetic construct
  REGION 1..14: note = Description of Artificial Sequence: Synthetic peptide
AIHGHSTLYADSVK

SEQ ID NO: 191 - protein, 14 aa, synthetic construct
  REGION 1..14: note = Description of Artificial Sequence: Synthetic peptide
AIHGDSTLYADSVK

SEQ ID NO: 192 - protein, 14 aa, synthetic construct
  REGION 1..14: note = Description of Artificial Sequence: Synthetic peptide
AIHGFDTLYADSVK

SEQ ID NO: 193 - protein, 14 aa, synthetic construct
  REGION 1..14: note = Description of Artificial Sequence: Synthetic peptide
AIHGASTLYADSVK

SEQ ID NO: 194 - protein, 14 aa, synthetic construct
  REGION 1..14: note = Description of Artificial Sequence: Synthetic peptide
AIHGSSTLYADSVK

SEQ ID NO: 195 - protein, 14 aa, synthetic construct
  REGION 1..14: note = Description of Artificial Sequence: Synthetic peptide
AIHGFTTLYADSVK

SEQ ID NO: 196 - protein, 14 aa, synthetic construct
  REGION 1..14: note = Description of Artificial Sequence: Synthetic peptide
AIHGTSTLYADSVK

SEQ ID NO: 197 - protein, 14 aa, synthetic construct
  REGION 1..14: note = Description of Artificial Sequence: Synthetic peptide
AIHGFSTVYADSVK

SEQ ID NO: 198 - protein, 14 aa, synthetic construct
  REGION 1..14: note = Description of Artificial Sequence: Synthetic peptide
AIHGKSTLYADSVK

SEQ ID NO: 199 - protein, 14 aa, synthetic construct
  REGION 1..14: note = Description of Artificial Sequence: Synthetic peptide
AIHGESTLYADSVK

SEQ ID NO: 200 - protein, 14 aa, synthetic construct
  REGION 1..14: note = Description of Artificial Sequence: Synthetic peptide
AIHGPSTLYADSVK

SEQ ID NO: 201 - protein, 14 aa, synthetic construct
  REGION 1..14: note = Description of Artificial Sequence: Synthetic peptide
AIHGISTLYADSVK

SEQ ID NO: 202 - protein, 14 aa, synthetic construct
  REGION 1..14: note = Description of Artificial Sequence: Synthetic peptide
AIHGFSTFYADSVK

SEQ ID NO: 203 - protein, 14 aa, synthetic construct
  REGION 1..14: note = Description of Artificial Sequence: Synthetic peptide
AIHGGSTLYADSVK

SEQ ID NO: 204 - protein, 14 aa, synthetic construct
  REGION 1..14: note = Description of Artificial Sequence: Synthetic peptide
AIHGSSTLYADSVK

SEQ ID NO: 205 - protein, 14 aa, synthetic construct
  REGION 1..14: note = Description of Artificial Sequence: Synthetic peptide
AIHGSSTLYADSVK

SEQ ID NO: 206 - protein, 14 aa, synthetic construct
  REGION 1..14: note = Description of Artificial Sequence: Synthetic peptide
AIHGFSTLYADSVK

SEQ ID NO: 207 - protein, 14 aa, synthetic construct
  REGION 1..14: note = Description of Artificial Sequence: Synthetic peptide
AIHGNSTLYADSVK

SEQ ID NO: 208 - protein, 14 aa, synthetic construct
  REGION 1..14: note = Description of Artificial Sequence: Synthetic peptide
AIHGESTLYADSVK

SEQ ID NO: 209 - protein, 14 aa, synthetic construct
  REGION 1..14: note = Description of Artificial Sequence: Synthetic peptide
AIHGFSTLYADSVK

SEQ ID NO: 210 - protein, 14 aa, synthetic construct
  REGION 1..14: note = Description of Artificial Sequence: Synthetic peptide
AIHGTSTLYADSVK

SEQ ID NO: 211 - protein, 14 aa, synthetic construct
  REGION 1..14: note = Description of Artificial Sequence: Synthetic peptide
AIHGTSTLYADSVK

SEQ ID NO: 212 - protein, 14 aa, synthetic construct
  REGION 1..14: note = Description of Artificial Sequence: Synthetic peptide
AIHGFDTLYADSVK

SEQ ID NO: 213 - protein, 14 aa, synthetic construct
  REGION 1..14: note = Description of Artificial Sequence: Synthetic peptide
AIHGASTLYADSVK

SEQ ID NO: 214 - protein, 14 aa, synthetic construct
  REGION 1..14: note = Description of Artificial Sequence: Synthetic peptide
AIHGNSTLYADSVK

SEQ ID NO: 215 - protein, 14 aa, synthetic construct
  REGION 1..14: note = Description of Artificial Sequence: Synthetic peptide
AIHGNSTLYADSVK

SEQ ID NO: 216 - protein, 14 aa, synthetic construct
  REGION 1..14: note = Description of Artificial Sequence: Synthetic peptide
AIHGESTLYADSVK

SEQ ID NO: 217 - protein, 14 aa, synthetic construct
  REGION 1..14: note = Description of Artificial Sequence: Synthetic peptide
AIHGESTLYADSVK

SEQ ID NO: 218 - protein, 14 aa, synthetic construct
  REGION 1..14: note = Description of Artificial Sequence: Synthetic peptide
AIHGFSTLYADSVK

SEQ ID NO: 219 - protein, 14 aa, synthetic construct
  REGION 1..14: note = Description of Artificial Sequence: Synthetic peptide
AIHGSSTLYADSVK

SEQ ID NO: 220 - protein, 14 aa, synthetic construct
  REGION 1..14: note = Description of Artificial Sequence: Synthetic peptide
AIHGSSTLYADSVK

SEQ ID NO: 221 - protein, 14 aa, synthetic construct
  REGION 1..14: note = Description of Artificial Sequence: Synthetic peptide
AIHGNSTLYADSVK

SEQ ID NO: 222 - protein, 14 aa, synthetic construct
  REGION 1..14: note = Description of Artificial Sequence: Synthetic peptide
AIHGKSTLYADSVK

SEQ ID NO: 223 - protein, 14 aa, synthetic construct
  REGION 1..14: note = Description of Artificial Sequence: Synthetic peptide
AIHGSSTLYADSVK

SEQ ID NO: 224 - protein, 14 aa, synthetic construct
  REGION 1..14: note = Description of Artificial Sequence: Synthetic peptide
AIHGSSTLYADSVK

SEQ ID NO: 225 - protein, 14 aa, synthetic construct
  REGION 1..14: note = Description of Artificial Sequence: Synthetic peptide
AIHGESTLYADSVK

SEQ ID NO: 226 - protein, 14 aa, synthetic construct
  REGION 1..14: note = Description of Artificial Sequence: Synthetic peptide
AIHGFSTIYADSVK

SEQ ID NO: 227 - protein, 14 aa, synthetic construct
  REGION 1..14: note = Description of Artificial Sequence: Synthetic peptide
AIHGFSTIYADSVK

SEQ ID NO: 228 - protein, 14 aa, synthetic construct
  REGION 1..14: note = Description of Artificial Sequence: Synthetic peptide
AIHGASTLYADSVK

SEQ ID NO: 229 - protein, 14 aa, synthetic construct
  REGION 1..14: note = Description of Artificial Sequence: Synthetic peptide
AIHGASTLYADSVK

SEQ ID NO: 230 - protein, 14 aa, synthetic construct
  REGION 1..14: note = Description of Artificial Sequence: Synthetic peptide
AIHGFSTLYADSVK

SEQ ID NO: 231 - protein, 12 aa, synthetic construct
  REGION 1..12: note = Description of Artificial Sequence: Synthetic peptide
VPWGDYHPRNVA

SEQ ID NO: 232 - protein, 12 aa, synthetic construct
  REGION 1..12: note = Description of Artificial Sequence: Synthetic peptide
VPWGDYHPRNVH

SEQ ID NO: 233 - protein, 12 aa, synthetic construct
  REGION 1..12: note = Description of Artificial Sequence: Synthetic peptide
VPWGDYHPRNVY

SEQ ID NO: 234 - protein, 12 aa, synthetic construct
  REGION 1..12: note = Description of Artificial Sequence: Synthetic peptide
VPWGRYHPRNVY

SEQ ID NO: 235 - protein, 12 aa, synthetic construct
  REGION 1..12: note = Description of Artificial Sequence: Synthetic peptide
VPWGDYHPRNVY

SEQ ID NO: 236 - protein, 12 aa, synthetic construct
  REGION 1..12: note = Description of Artificial Sequence: Synthetic peptide
VPWGDYHPRNVY

SEQ ID NO: 237 - protein, 12 aa, synthetic construct
  REGION 1..12: note = Description of Artificial Sequence: Synthetic peptide
VPWGDYHPGNVY

SEQ ID NO: 238 - protein, 12 aa, synthetic construct
  REGION 1..12: note = Description of Artificial Sequence: Synthetic peptide
VPWGDYHPRKVY

SEQ ID NO: 239 - protein, 12 aa, synthetic construct
  REGION 1..12: note = Description of Artificial Sequence: Synthetic peptide
VPWGSYHPRNVY

SEQ ID NO: 240 - protein, 12 aa, synthetic construct
  REGION 1..12: note = Description of Artificial Sequence: Synthetic peptide
VPWGDYHPRNVA

SEQ ID NO: 241 - protein, 12 aa, synthetic construct
  REGION 1..12: note = Description of Artificial Sequence: Synthetic peptide
VPWGDYHPRNVY

SEQ ID NO: 242 - protein, 12 aa, synthetic construct
  REGION 1..12: note = Description of Artificial Sequence: Synthetic peptide
VPWGDYHPRNVV

SEQ ID NO: 243 - protein, 12 aa, synthetic construct
  REGION 1..12: note = Description of Artificial Sequence: Synthetic peptide
VPWGDYHPRNVK

SEQ ID NO: 244 - protein, 12 aa, synthetic construct
  REGION 1..12: note = Description of Artificial Sequence: Synthetic peptide
VPWGDYHPGNVY

SEQ ID NO: 245 - protein, 12 aa, synthetic construct
  REGION 1..12: note = Description of Artificial Sequence: Synthetic peptide
VPWGEYHPRNVY

SEQ ID NO: 246 - protein, 12 aa, synthetic construct
  REGION 1..12: note = Description of Artificial Sequence: Synthetic peptide
VPWGIYHPRNVY

SEQ ID NO: 247 - protein, 12 aa, synthetic construct
  REGION 1..12: note = Description of Artificial Sequence: Synthetic peptide
VPWGRYHPRNVY

SEQ ID NO: 248 - protein, 12 aa, synthetic construct
  REGION 1..12: note = Description of Artificial Sequence: Synthetic peptide
VPWGDYHPGNVY

SEQ ID NO: 249 - protein, 12 aa, synthetic construct
  REGION 1..12: note = Description of Artificial Sequence: Synthetic peptide
VPWGDYHPRNVV

SEQ ID NO: 250 - protein, 12 aa, synthetic construct
  REGION 1..12: note = Description of Artificial Sequence: Synthetic peptide
VPWGDYHPGNVY

SEQ ID NO: 251 - protein, 12 aa, synthetic construct
  REGION 1..12: note = Description of Artificial Sequence: Synthetic peptide
VPWGRYHPRNVY

SEQ ID NO: 252 - protein, 12 aa, synthetic construct
  REGION 1..12: note = Description of Artificial Sequence: Synthetic peptide
VPWGDYHPRNVY

SEQ ID NO: 253 - protein, 12 aa, synthetic construct
  REGION 1..12: note = Description of Artificial Sequence: Synthetic peptide
VPWGDYHPGNVY

SEQ ID NO: 254 - protein, 12 aa, synthetic construct
  REGION 1..12: note = Description of Artificial Sequence: Synthetic peptide
VPWGKYHPRNVY

SEQ ID NO: 255 - protein, 12 aa, synthetic construct
  REGION 1..12: note = Description of Artificial Sequence: Synthetic peptide
VPWGSYHPRNVY

SEQ ID NO: 256 - protein, 12 aa, synthetic construct
  REGION 1..12: note = Description of Artificial Sequence: Synthetic peptide
VPWGDYHPRNVH

SEQ ID NO: 257 - protein, 12 aa, synthetic construct
  REGION 1..12: note = Description of Artificial Sequence: Synthetic peptide
VPWGYYHPRNVY

SEQ ID NO: 258 - protein, 12 aa, synthetic construct
  REGION 1..12: note = Description of Artificial Sequence: Synthetic peptide
VPWGDYHPGNVY

SEQ ID NO: 259 - protein, 12 aa, synthetic construct
  REGION 1..12: note = Description of Artificial Sequence: Synthetic peptide
VPWGDYHPRNVR

SEQ ID NO: 260 - protein, 12 aa, synthetic construct
  REGION 1..12: note = Description of Artificial Sequence: Synthetic peptide
VPWGDYHPRNVQ

SEQ ID NO: 261 - protein, 12 aa, synthetic construct
  REGION 1..12: note = Description of Artificial Sequence: Synthetic peptide
VPWGDYHPRNVY

SEQ ID NO: 262 - protein, 12 aa, synthetic construct
  REGION 1..12: note = Description of Artificial Sequence: Synthetic peptide
VPWGDYHPRNVT

SEQ ID NO: 263 - protein, 12 aa, synthetic construct
  REGION 1..12: note = Description of Artificial Sequence: Synthetic peptide
VPWGDYHPRNVN

SEQ ID NO: 264 - protein, 12 aa, synthetic construct
  REGION 1..12: note = Description of Artificial Sequence: Synthetic peptide
VPWGRYHPRNVY

SEQ ID NO: 265 - protein, 12 aa, synthetic construct
  REGION 1..12: note = Description of Artificial Sequence: Synthetic peptide
VPWGDYHPGNVY

SEQ ID NO: 266 - protein, 12 aa, synthetic construct
  REGION 1..12: note = Description of Artificial Sequence: Synthetic peptide
VPWGDYHPGNVY

SEQ ID NO: 267 - protein, 12 aa, synthetic construct
  REGION 1..12: note = Description of Artificial Sequence: Synthetic peptide
VPWGKYHPRNVY

SEQ ID NO: 268 - protein, 12 aa, synthetic construct
  REGION 1..12: note = Description of Artificial Sequence: Synthetic peptide
VPWGDYHPRNVY

SEQ ID NO: 269 - protein, 12 aa, synthetic construct
  REGION 1..12: note = Description of Artificial Sequence: Synthetic peptide
VPWGDYHPRNVQ

SEQ ID NO: 270 - protein, 12 aa, synthetic construct
  REGION 1..12: note = Description of Artificial Sequence: Synthetic peptide
VPWGDYHPGNVC

SEQ ID NO: 271 - protein, 12 aa, synthetic construct
  REGION 1..12: note = Description of Artificial Sequence: Synthetic peptide
VPWGDYHPRRVY

SEQ ID NO: 272 - protein, 12 aa, synthetic construct
  REGION 1..12: note = Description of Artificial Sequence: Synthetic peptide
VPWGRYHPRNVY

SEQ ID NO: 273 - protein, 12 aa, synthetic construct
  REGION 1..12: note = Description of Artificial Sequence: Synthetic peptide
VPWGTYHPRNVY

SEQ ID NO: 274 - protein, 12 aa, synthetic construct
  REGION 1..12: note = Description of Artificial Sequence: Synthetic peptide
VPWGDYHPGNVY

SEQ ID NO: 275 - protein, 12 aa, synthetic construct
  REGION 1..12: note = Description of Artificial Sequence: Synthetic peptide
VPWGRYHPRNVY

SEQ ID NO: 276 - protein, 12 aa, synthetic construct
  REGION 1..12: note = Description of Artificial Sequence: Synthetic peptide
VPWGDYHPGNVY

SEQ ID NO: 277 - protein, 12 aa, synthetic construct
  REGION 1..12: note = Description of Artificial Sequence: Synthetic peptide
VPWGDYHPTNVY

SEQ ID NO: 278 - protein, 12 aa, synthetic construct
  REGION 1..12: note = Description of Artificial Sequence: Synthetic peptide
VPWGRYHPRNVY

SEQ ID NO: 279 - protein, 12 aa, synthetic construct
  REGION 1..12: note = Description of Artificial Sequence: Synthetic peptide
VPWGDYHPRNVT

SEQ ID NO: 280 - protein, 12 aa, synthetic construct
  REGION 1..12: note = Description of Artificial Sequence: Synthetic peptide
VPWGRYHPRNVY

SEQ ID NO: 281 - protein, 12 aa, synthetic construct
  REGION 1..12: note = Description of Artificial Sequence: Synthetic peptide
VPWGDYHPRRVY

SEQ ID NO: 282 - protein, 12 aa, synthetic construct
  REGION 1..12: note = Description of Artificial Sequence: Synthetic peptide
VPWGDYHPRMVY

SEQ ID NO: 283 - protein, 12 aa, synthetic construct
  REGION 1..12: note = Description of Artificial Sequence: Synthetic peptide
VPWGDYHPRNVL

SEQ ID NO: 284 - protein, 12 aa, synthetic construct
  REGION 1..12: note = Description of Artificial Sequence: Synthetic peptide
VPWGDYHPGNVY

SEQ ID NO: 285 - protein, 12 aa, synthetic construct
  REGION 1..12: note = Description of Artificial Sequence: Synthetic peptide
VPWGRYHPRNVY

SEQ ID NO: 286 - protein, 12 aa, synthetic construct
  REGION 1..12: note = Description of Artificial Sequence: Synthetic peptide
VPWGAYHPRNVY

SEQ ID NO: 287 - protein, 12 aa, synthetic construct
  REGION 1..12: note = Description of Artificial Sequence: Synthetic peptide
VPWGDYHPRNVA

SEQ ID NO: 288 - protein, 12 aa, synthetic construct
  REGION 1..12: note = Description of Artificial Sequence: Synthetic peptide
VPWGDYHPQNVY

SEQ ID NO: 289 - protein, 12 aa, synthetic construct
  REGION 1..12: note = Description of Artificial Sequence: Synthetic peptide
VPWGDYHPRNVT

SEQ ID NO: 290 - protein, 12 aa, synthetic construct
  REGION 1..12: note = Description of Artificial Sequence: Synthetic peptide
VPWGRYHPRNVY

SEQ ID NO: 291 - protein, 12 aa, synthetic construct
  REGION 1..12: note = Description of Artificial Sequence: Synthetic peptide
VPWGDYHPGNVY

SEQ ID NO: 292 - protein, 12 aa, synthetic construct
  REGION 1..12: note = Description of Artificial Sequence: Synthetic peptide
VPWGDYHPGNVY

SEQ ID NO: 293 - protein, 12 aa, synthetic construct
  REGION 1..12: note = Description of Artificial Sequence: Synthetic peptide
VPWGDYHPGNVY

SEQ ID NO: 294 - protein, 12 aa, synthetic construct
  REGION 1..12: note = Description of Artificial Sequence: Synthetic peptide
VPWGDYHPRNVY

SEQ ID NO: 295 - protein, 12 aa, synthetic construct
  REGION 1..12: note = Description of Artificial Sequence: Synthetic peptide
VPWGDYHPGNVY

SEQ ID NO: 296 - protein, 12 aa, synthetic construct
  REGION 1..12: note = Description of Artificial Sequence: Synthetic peptide
VPWGDYHPSNVY

SEQ ID NO: 297 - protein, 12 aa, synthetic construct
  REGION 1..12: note = Description of Artificial Sequence: Synthetic peptide
VPWGDYHPGNVY

SEQ ID NO: 298 - protein, 12 aa, synthetic construct
  REGION 1..12: note = Description of Artificial Sequence: Synthetic peptide
VPWGDYHPREVY

SEQ ID NO: 299 - protein, 12 aa, synthetic construct
  REGION 1..12: note = Description of Artificial Sequence: Synthetic peptide
VPWGRYHPGNVY

SEQ ID NO: 300 - protein, 12 aa, synthetic construct
  REGION 1..12: note = Description of Artificial Sequence: Synthetic peptide
VPWGDYHPRVVY

SEQ ID NO: 301 - protein, 12 aa, synthetic construct
  REGION 1..12: note = Description of Artificial Sequence: Synthetic peptide
VPWGDYHPRNVM

SEQ ID NO: 302 - protein, 12 aa, synthetic construct
  REGION 1..12: note = Description of Artificial Sequence: Synthetic peptide
VPWGDYHPLNVY

SEQ ID NO: 303 - protein, 12 aa, synthetic construct
  REGION 1..12: note = Description of Artificial Sequence: Synthetic peptide
VPWGDYHPGNVY

SEQ ID NO: 304 - protein, 12 aa, synthetic construct
  REGION 1..12: note = Description of Artificial Sequence: Synthetic peptide
VPWGDYHPGNVY

SEQ ID NO: 305 - protein, 12 aa, synthetic construct
  REGION 1..12: note = Description of Artificial Sequence: Synthetic peptide
VPWGDYHPRNVT

SEQ ID NO: 306 - protein, 12 aa, synthetic construct
  REGION 1..12: note = Description of Artificial Sequence: Synthetic peptide
VPWGDYHPRNVS

SEQ ID NO: 307 - protein, 12 aa, synthetic construct
  REGION 1..12: note = Description of Artificial Sequence: Synthetic peptide
VPWGDYHPRNVY

SEQ ID NO: 308 - protein, 12 aa, synthetic construct
  REGION 1..12: note = Description of Artificial Sequence: Synthetic peptide
VPWGDYHPGNVY

SEQ ID NO: 309 - protein, 12 aa, synthetic construct
  REGION 1..12: note = Description of Artificial Sequence: Synthetic peptide
VPWGDYHPGNVY

SEQ ID NO: 310 - protein, 12 aa, synthetic construct
  REGION 1..12: note = Description of Artificial Sequence: Synthetic peptide
VPWGDYHPRNVT

SEQ ID NO: 311 - protein, 12 aa, synthetic construct
  REGION 1..12: note = Description of Artificial Sequence: Synthetic peptide
VPWGDYHPGNVY

SEQ ID NO: 312 - protein, 12 aa, synthetic construct
  REGION 1..12: note = Description of Artificial Sequence: Synthetic peptide
VPWGRYHPRNVY

SEQ ID NO: 313 - protein, 12 aa, synthetic construct
  REGION 1..12: note = Description of Artificial Sequence: Synthetic peptide
VPWGDYHPNNVY

SEQ ID NO: 314 - protein, 12 aa, synthetic construct
  REGION 1..12: note = Description of Artificial Sequence: Synthetic peptide
VPWGDYHPGNVY

SEQ ID NO: 315 - protein, 12 aa, synthetic construct
  REGION 1..12: note = Description of Artificial Sequence: Synthetic peptide
VPWGDYHPRNVT

SEQ ID NO: 316 - protein, 12 aa, synthetic construct
  REGION 1..12: note = Description of Artificial Sequence: Synthetic peptide
VPWGDYHPGNVY

SEQ ID NO: 317 - protein, 12 aa, synthetic construct
  REGION 1..12: note = Description of Artificial Sequence: Synthetic peptide
VPWGDYHPGNVY

SEQ ID NO: 318 - protein, 12 aa, synthetic construct
  REGION 1..12: note = Description of Artificial Sequence: Synthetic peptide
VPWGDYHPRNVA

SEQ ID NO: 319 - protein, 12 aa, synthetic construct
  REGION 1..12: note = Description of Artificial Sequence: Synthetic peptide
VPWGDYHPGNVY

SEQ ID NO: 320 - protein, 12 aa, synthetic construct
  REGION 1..12: note = Description of Artificial Sequence: Synthetic peptide
VPWGDYHPKNVY

SEQ ID NO: 321 - protein, 12 aa, synthetic construct
  REGION 1..12: note = Description of Artificial Sequence: Synthetic peptide
VPWGDYHPGNVY

SEQ ID NO: 322 - protein, 12 aa, synthetic construct
  REGION 1..12: note = Description of Artificial Sequence: Synthetic peptide
VPWGKYHPRNVY

SEQ ID NO: 323 - protein, 12 aa, synthetic construct
  REGION 1..12: note = Description of Artificial Sequence: Synthetic peptide
VPWGRYHPRNVY

SEQ ID NO: 324 - protein, 12 aa, synthetic construct
  REGION 1..12: note = Description of Artificial Sequence: Synthetic peptide
VPWGDYHPGNVY

SEQ ID NO: 325 - protein, 12 aa, synthetic construct
  REGION 1..12: note = Description of Artificial Sequence: Synthetic peptide
VPWGDYHPRNVQ

SEQ ID NO: 326 - protein, 12 aa, synthetic construct
  REGION 1..12: note = Description of Artificial Sequence: Synthetic peptide
VPWGDYHPGNVY

SEQ ID NO: 327 - protein, 12 aa, synthetic construct
  REGION 1..12: note = Description of Artificial Sequence: Synthetic peptide
VPWGDYHPRNVS

SEQ ID NO: 328 - protein, 12 aa, synthetic construct
  REGION 1..12: note = Description of Artificial Sequence: Synthetic peptide
VPWGDYHPGNVY

SEQ ID NO: 329 - protein, 12 aa, synthetic construct
  REGION 1..12: note = Description of Artificial Sequence: Synthetic peptide
VPWGDYHPGNVY

SEQ ID NO: 330 - protein, 12 aa, synthetic construct
  REGION 1..12: note = Description of Artificial Sequence: Synthetic peptide
VPWGDYHPGNVY

SEQ ID NO: 331 - protein, 12 aa, synthetic construct
  REGION 1..12: note = Description of Artificial Sequence: Synthetic peptide
VPWGDYHPRDVY

SEQ ID NO: 332 - protein, 12 aa, synthetic construct
  REGION 1..12: note = Description of Artificial Sequence: Synthetic peptide
VPWGDYHPRNVT

SEQ ID NO: 333 - protein, 12 aa, synthetic construct
  REGION 1..12: note = Description of Artificial Sequence: Synthetic peptide
VPWGDYHPRNVA

SEQ ID NO: 334 - protein, 12 aa, synthetic construct
  REGION 1..12: note = Description of Artificial Sequence: Synthetic peptide
VPWGDYHPRNVT

SEQ ID NO: 335 - protein, 12 aa, synthetic construct
  REGION 1..12: note = Description of Artificial Sequence: Synthetic peptide
VPWGDYHPRNVY

SEQ ID NO: 336 - protein, 12 aa, synthetic construct
  REGION 1..12: note = Description of Artificial Sequence: Synthetic peptide
VPWGDYHPRNVY

SEQ ID NO: 337 - protein, 12 aa, synthetic construct
  REGION 1..12: note = Description of Artificial Sequence: Synthetic peptide
VPWGDYHPRNVV

SEQ ID NO: 338 - protein, 12 aa, synthetic construct
  REGION 1..12: note = Description of Artificial Sequence: Synthetic peptide
VPWGDYHPRNVV

SEQ ID NO: 339 - protein, 12 aa, synthetic construct
  REGION 1..12: note = Description of Artificial Sequence: Synthetic peptide
VPWGDYHPGNVY

SEQ ID NO: 340 - protein, 12 aa, synthetic construct
  REGION 1..12: note = Description of Artificial Sequence: Synthetic peptide
VPWGDYHPRNVY

SEQ ID NO: 341 - protein, 12 aa, synthetic construct
  REGION 1..12: note = Description of Artificial Sequence: Synthetic peptide
VPWGDYHPGNVY

SEQ ID NO: 342 - protein, 12 aa, synthetic construct
  REGION 1..12: note = Description of Artificial Sequence: Synthetic peptide
VPWGDYHPGNVY

SEQ ID NO: 343 - protein, 12 aa, synthetic construct
  REGION 1..12: note = Description of Artificial Sequence: Synthetic peptide
VPWGDYHPGNVY

SEQ ID NO: 344 - protein, 12 aa, synthetic construct
  REGION 1..12: note = Description of Artificial Sequence: Synthetic peptide
VPWGDYHPGNVY

SEQ ID NO: 345 - protein, 12 aa, synthetic construct
  REGION 1..12: note = Description of Artificial Sequence: Synthetic peptide
VPWGDYHPRNVY

SEQ ID NO: 346 - protein, 119 aa, synthetic construct
  REGION 1..119: note = Description of Artificial Sequence: Synthetic polypeptide
EVQLVESGGGLVQPGRSLTLSCAASTNIFSISPMGWYRQAPGKQRELVAAIHGFSTLYADSVKGRFTISRDNAKNSIYLQMNSLRPEDTALYYCNKVPWGDYHPRNVYWGQGTQVTVSS

SEQ ID NO: 347 - protein, 119 aa, synthetic construct
  REGION 1..119: note = Description of Artificial Sequence: Synthetic polypeptide
EVQLVESGGGLVQPGRSLTLSCAASTDIFSISPMGWYRQAPGKQRELVAAIHGGSTLYADSVKGRFTISRDNAKNSIYLQMNSLRPEDTALYYCNKVPWGDYHPRNVAWGQGTQVTVSS

SEQ ID NO: 348 - protein, 119 aa, synthetic construct
  REGION 1..119: note = Description of Artificial Sequence: Synthetic polypeptide
EVQLVESGGGLVQPGRSLTLSCAASTNDFSISPMGWYRQAPGKQRELVAAIHGGSTLYADSVKGRFTISRDNAKNSIYLQMNSLRPEDTALYYCNKVPWGDYHPRNVAWGQGTQVTVSS

SEQ ID NO: 349 - protein, 119 aa, synthetic construct
  REGION 1..119: note = Description of Artificial Sequence: Synthetic polypeptide
EVQLVESGGGLVQPGRSLTLSCAASTNIFSKSPMGWYRQAPGKQRELVAAIHGKSTLYADSVKGRFTISRDNAKNSIYLQMNSLRPEDTALYYCNKVPWGDYHPRNVVWGQGTQVTVSS

SEQ ID NO: 350 - protein, 119 aa, synthetic construct
  REGION 1..119: note = Description of Artificial Sequence: Synthetic polypeptide
EVQLVESGGGLVQPGRSLTLSCAASTNDFSISPMGWYRQAPGKQRELVAAIHGKSTLYADSVKGRFTISRDNAKNSIYLQMNSLRPEDTALYYCNKVPWGDYHPRNVKWGQGTQVTVSS

SEQ ID NO: 351 - protein, 119 aa, synthetic construct
  REGION 1..119: note = Description of Artificial Sequence: Synthetic polypeptide
EVQLVESGGGLVQPGRSLTLSCAASTNQFSISPMGWYRQAPGKQRELVAAIHGKSTLYADSVKGRFTISRDNAKNSIYLQMNSLRPEDTALYYCNKVPWGDYHPRNVVWGQGTQVTVSS

SEQ ID NO: 352 - protein, 119 aa, synthetic construct
  REGION 1..119: note = Description of Artificial Sequence: Synthetic polypeptide
EVQLVESGGGLVQPGRSLTLSCAASTNIFSSSPMGWYRQAPGKQRELVAAINGFSTLYADSVKGRFTISRDNAKNSIYLQMNSLRPEDTALYYCNKVPWGDYHPRNVHWGQGTQVTVSS

SEQ ID NO: 353 - protein, 119 aa, synthetic construct
  REGION 1..119: note = Description of Artificial Sequence: Synthetic polypeptide
EVQLVESGGGLVQPGRSLTLSCAASTNIFSSSPMGWYRQAPGKQRELVAAIHGFSTLYADSVKGRFTISRDNAKNSIYLQMNSLRPEDTALYYCNKVPWGDYHPRNVYWGQGTQVTVSS

SEQ ID NO: 354 - protein, 119 aa, synthetic construct
  REGION 1..119: note = Description of Artificial Sequence: Synthetic polypeptide
EVQLVESGGGLVQPGRSLTLSCAASTNIFSTSPMGWYRQAPGKQRELVAAIHGFQTLYADSVKGRFTISRDNAKNSIYLQMNSLRPEDTALYYCNKVPWGDYHPRNVVWGQGTQVTVSS

SEQ ID NO: 355 - protein, 119 aa, synthetic construct
  REGION 1..119: note = Description of Artificial Sequence: Synthetic polypeptide
EVQLVESGGGLVQPGRSLTLSCAASTNIFSRSPMGWYRQAPGKQRELVAAIHGFETLYADSVKGRFTISRDNAKNSIYLQMNSLRPEDTALYYCNKVPWGDYHPRNVLWGQGTQVTVSS

SEQ ID NO: 356 - protein, 119 aa, synthetic construct
  REGION 1..119: note = Description of Artificial Sequence: Synthetic polypeptide
EVQLVESGGGLVQPGRSLTLSCAASTNIFSESPMGWYRQAPGKQRELVAAIHGFTTLYADSVKGRFTISRDNAKNSIYLQMNSLRPEDTALYYCNKVPWGDYHPRNVTWGQGTQVTVSS

SEQ ID NO: 357 - protein, 119 aa, synthetic construct
  REGION 1..119: note = Description of Artificial Sequence: Synthetic polypeptide
EVQLVESGGGLVQPGRSLTLSCAASTNIFSDSPMGWYRQAPGKQRELVAAIHGFSTLYADSVKGRFTISRDNAKNSIYLQMNSLRPEDTALYYCNKVPWGDYHPRNVAWGQGTQVTVSS

SEQ ID NO: 358 - protein, 119 aa, synthetic construct
  REGION 1..119: note = Description of Artificial Sequence: Synthetic polypeptide
EVQLVESGGGLVQPGRSLTLSCAASTNIFSNSPMGWYRQAPGKQRELVAAIHGGSTLYADSVKGRFTISRDNAKNSIYLQMNSLRPEDTALYYCNKVPWGDYHPRNVHWGQGTQVTVSS

SEQ ID NO: 359 - protein, 119 aa, synthetic construct
  REGION 1..119: note = Description of Artificial Sequence: Synthetic polypeptide
EVQLVESGGGLVQPGRSLTLSCAASTNIFSNSPMGWYRQAPGKQRELVAAIHGRSTLYADSVKGRFTISRDNAKNSIYLQMNSLRPEDTALYYCNKVPWGDYHPRNVMWGQGTQVTVSS

SEQ ID NO: 360 - protein, 119 aa, synthetic construct
  REGION 1..119: note = Description of Artificial Sequence: Synthetic polypeptide
EVQLVESGGGLVQPGRSLTLSCAASTNIFSNSPMGWYRQAPGKQRELVAAIHGPSTLYADSVKGRFTISRDNAKNSIYLQMNSLRPEDTALYYCNKVPWGDYHPRNVTWGQGTQVTVSS

SEQ ID NO: 361 - protein, 119 aa, synthetic construct
  REGION 1..119: note = Description of Artificial Sequence: Synthetic polypeptide
EVQLVESGGGLVQPGRSLTLSCAASTNIFSNSPMGWYRQAPGKQRELVAAIHGDSTLYADSVKGRFTISRDNAKNSIYLQMNSLRPEDTALYYCNKVPWGDYHPRNVRWGQGTQVTVSS

SEQ ID NO: 362 - protein, 119 aa, synthetic construct
  REGION 1..119: note = Description of Artificial Sequence: Synthetic polypeptide
EVQLVESGGGLVQPGRSLTLSCAASTNIFSRSPMGWYRQAPGKQRELVAAIHGDSTLYADSVKGRFTISRDNAKNSIYLQMNSLRPEDTALYYCNKVPWGDYHPRNVTWGQGTQVTVSS

SEQ ID NO: 363 - protein, 119 aa, synthetic construct
  REGION 1..119: note = Description of Artificial Sequence: Synthetic polypeptide
EVQLVESGGGLVQPGRSLTLSCAASTNIFSKSPMGWYRQAPGKQRELVAAIHGQSTLYADSVKGRFTISRDNAKNSIYLQMNSLRPEDTALYYCNKVPWGDYHPRNVTWGQGTQVTVSS

SEQ ID NO: 364 - protein, 119 aa, synthetic construct
  REGION 1..119: note = Description of Artificial Sequence: Synthetic polypeptide
EVQLVESGGGLVQPGRSLTLSCAASTNIFSSSPMGWYRQAPGKQRELVAAIHGHSTLYADSVKGRFTISRDNAKNSIYLQMNSLRPEDTALYYCNKVPWGDYHPRNVTWGQGTQVTVSS

SEQ ID NO: 365 - protein, 119 aa, synthetic construct
  REGION 1..119: note = Description of Artificial Sequence: Synthetic polypeptide
EVQLVESGGGLVQPGRSLTLSCAASTNIFSSSPMGWYRQAPGKQRELVAAIHGESTLYADSVKGRFTISRDNAKNSIYLQMNSLRPEDTALYYCNKVPWGDYHPRKVYWGQGTQVTVSS

SEQ ID NO: 366 - protein, 119 aa, synthetic construct
  REGION 1..119: note = Description of Artificial Sequence: Synthetic polypeptide
EVQLVESGGGLVQPGRSLTLSCAASTNIFSRSPMGWYRQAPGKQRELVAAIHGNSTLYADSVKGRFTISRDNAKNSIYLQMNSLRPEDTALYYCNKVPWGIYHPRNVYWGQGTQVTVSS

SEQ ID NO: 367 - protein, 119 aa, synthetic construct
  REGION 1..119: note = Description of Artificial Sequence: Synthetic polypeptide
EVQLVESGGGLVQPGRSLTLSCAASTNIFSESPMGWYRQAPGKQRELVAAIHGNSTLYADSVKGRFTISRDNAKNSIYLQMNSLRPEDTALYYCNKVPWGTYHPRNVYWGQGTQVTVSS

SEQ ID NO: 368 - protein, 119 aa, synthetic construct
  REGION 1..119: note = Description of Artificial Sequence: Synthetic polypeptide
EVQLVESGGGLVQPGRSLTLSCAASTNIFSVSPMGWYRQAPGKQRELVAAIHGNSTLYADSVKGRFTISRDNAKNSIYLQMNSLRPEDTALYYCNKVPWGKYHPRNVYWGQGTQVTVSS

SEQ ID NO: 369 - protein, 119 aa, synthetic construct
  REGION 1..119: note = Description of Artificial Sequence: Synthetic polypeptide
EVQLVESGGGLVQPGRSLTLSCAASTNIFSVSPMGWYRQAPGKQRELVAAIHGNSTLYADSVKGRFTISRDNAKNSIYLQMNSLRPEDTALYYCNKVPWGDYHPRNVYWGQGTQVTVSS

SEQ ID NO: 370 - protein, 119 aa, synthetic construct
  REGION 1..119: note = Description of Artificial Sequence: Synthetic polypeptide
EVQLVESGGGLVQPGRSLTLSCAASTNIFSKSPMGWYRQAPGKQRELVAAIHGNSTLYADSVKGRFTISRDNAKNSIYLQMNSLRPEDTALYYCNKVPWGDYHPREVYWGQGTQVTVSS

SEQ ID NO: 371 - protein, 119 aa, synthetic construct
  REGION 1..119: note = Description of Artificial Sequence: Synthetic polypeptide
EVQLVESGGGLVQPGRSLTLSCAASTNIFSDSPMGWYRQAPGKQRELVAAIHGTSTLYADSVKGRFTISRDNAKNSIYLQMNSLRPEDTALYYCNKVPWGDYHPRNVYWGQGTQVTVSS

SEQ ID NO: 372 - protein, 119 aa, synthetic construct
  REGION 1..119: note = Description of Artificial Sequence: Synthetic polypeptide
EVQLVESGGGLVQPGRSLTLSCAASTNIFSRSPMGWYRQAPGKQRELVAAIHGTSTLYADSVKGRFTISRDNAKNSIYLQMNSLRPEDTALYYCNKVPWGKYHPRNVYWGQGTQVTVSS

SEQ ID NO: 373 - protein, 119 aa, synthetic construct
  REGION 1..119: note = Description of Artificial Sequence: Synthetic polypeptide
EVQLVESGGGLVQPGRSLTLSCAASTNIFSHSPMGWYRQAPGKQRELVAAIHGTSTLYADSVKGRFTISRDNAKNSIYLQMNSLRPEDTALYYCNKVPWGRYHPRNVYWGQGTQVTVSS

SEQ ID NO: 374 - protein, 119 aa, synthetic construct
  REGION 1..119: note = Description of Artificial Sequence: Synthetic polypeptide
EVQLVESGGGLVQPGRSLTLSCAASTNIFSTSPMGWYRQAPGKQRELVAAIHGTSTLYADSVKGRFTISRDNAKNSIYLQMNSLRPEDTALYYCNKVPWGDYHPGNVYWGQGTQVTVSS

SEQ ID NO: 375 - protein, 119 aa, synthetic construct
  REGION 1..119: note = Description of Artificial Sequence: Synthetic polypeptide
EVQLVESGGGLVQPGRSLTLSCAASTNIFSTSPMGWYRQAPGKQRELVAAIHGTSTLYADSVKGRFTISRDNAKNSIYLQMNSLRPEDTALYYCNKVPWGDYHPRNVQWGQGTQVTVSS

SEQ ID NO: 376 - protein, 119 aa, synthetic construct
  REGION 1..119: note = Description of Artificial Sequence: Synthetic polypeptide
EVQLVESGGGLVQPGRSLTLSCAASTNIFSLSPMGWYRQAPGKQRELVAAIHGDSTLYADSVKGRFTISRDNAKNSIYLQMNSLRPEDTALYYCNKVPWGDYHPRNVYWGQGTQVTVSS

SEQ ID NO: 377 - protein, 119 aa, synthetic construct
  REGION 1..119: note = Description of Artificial Sequence: Synthetic polypeptide
EVQLVESGGGLVQPGRSLTLSCAASTNIFSISPGGWYRQAPGKQRELVAAIHGSSTLYADSVKGRFTISRDNAKNSIYLQMNSLRPEDTALYYCNKVPWGDYHPRNVYWGQGTQVTVSS

SEQ ID NO: 378 - protein, 119 aa, synthetic construct
  REGION 1..119: note = Description of Artificial Sequence: Synthetic polypeptide
EVQLVESGGGLVQPGRSLTLSCAASTNHFSISPMGWYRQAPGKQRELVAAIHGSSTLYADSVKGRFTISRDNAKNSIYLQMNSLRPEDTALYYCNKVPWGDYHPRVVYWGQGTQVTVSS

SEQ ID NO: 379 - protein, 119 aa, synthetic construct
  REGION 1..119: note = Description of Artificial Sequence: Synthetic polypeptide
EVQLVESGGGLVQPGRSLTLSCAASTNIFSASPMGWYRQAPGKQRELVAAIHGSSTLYADSVKGRFTISRDNAKNSIYLQMNSLRPEDTALYYCNKVPWGDYHPRNVNWGQGTQVTVSS

SEQ ID NO: 380 - protein, 119 aa, synthetic construct
  REGION 1..119: note = Description of Artificial Sequence: Synthetic polypeptide
EVQLVESGGGLVQPGRSLTLSCAASTNIFSASPMGWYRQAPGKQRELVAAIHGSSTLYADSVKGRFTISRDNAKNSIYLQMNSLRPEDTALYYCNKVPWGRYHPRNVYWGQGTQVTVSS

SEQ ID NO: 381 - protein, 119 aa, synthetic construct
  REGION 1..119: note = Description of Artificial Sequence: Synthetic polypeptide
EVQLVESGGGLVQPGRSLTLSCAASTNISSISPMGWYRQAPGKQRELVAAIHGTSTLYADSVKGRFTISRDNAKNSIYLQMNSLRPEDTALYYCNKVPWGDYHPGNVYWGQGTQVTVSS

SEQ ID NO: 382 - protein, 119 aa, synthetic construct
  REGION 1..119: note = Description of Artificial Sequence: Synthetic polypeptide
EVQLVESGGGLVQPGRSLTLSCAASTNIESISPMGWYRQAPGKQRELVAAIHGTSTLYADSVKGRFTISRDNAKNSIYLQMNSLRPEDTALYYCNKVPWGDYHPGNVYWGQGTQVTVSS

SEQ ID NO: 383 - protein, 119 aa, synthetic construct
  REGION 1..119: note = Description of Artificial Sequence: Synthetic polypeptide
EVQLVESGGGLVQPGRSLTLSCAASTNIFSISPYGWYRQAPGKQRELVAAIHGTSTLYADSVKGRFTISRDNAKNSIYLQMNSLRPEDTALYYCNKVPWGDYHPGNVYWGQGTQVTVSS

SEQ ID NO: 384 - protein, 119 aa, synthetic construct
  REGION 1..119: note = Description of Artificial Sequence: Synthetic polypeptide
EVQLVESGGGLVQPGRSLTLSCAASTNIASISPMGWYRQAPGKQRELVAAIHGTSTLYADSVKGRFTISRDNAKNSIYLQMNSLRPEDTALYYCNKVPWGDYHPGNVYWGQGTQVTVSS

SEQ ID NO: 385 - protein, 119 aa, synthetic construct
  REGION 1..119: note = Description of Artificial Sequence: Synthetic polypeptide
EVQLVESGGGLVQPGRSLTLSCAASTNIASISPMGWYRQAPGKQRELVAAIHGKSTLYADSVKGRFTISRDNAKNSIYLQMNSLRPEDTALYYCNKVPWGDYHPGNVYWGQGTQVTVSS

SEQ ID NO: 386 - protein, 119 aa, synthetic construct
  REGION 1..119: note = Description of Artificial Sequence: Synthetic polypeptide
EVQLVESGGGLVQPGRSLTLSCAASTNIASISPMGWYRQAPGKQRELVAAIHGSSTLYADSVKGRFTISRDNAKNSIYLQMNSLRPEDTALYYCNKVPWGDYHPGNVYWGQGTQVTVSS

SEQ ID NO: 387 - protein, 119 aa, synthetic construct
  REGION 1..119: note = Description of Artificial Sequence: Synthetic polypeptide
EVQLVESGGGLVQPGRSLTLSCAASTNITSISPMGWYRQAPGKQRELVAAIHGDSTLYADSVKGRFTISRDNAKNSIYLQMNSLRPEDTALYYCNKVPWGDYHPGNVYWGQGTQVTVSS

SEQ ID NO: 388 - protein, 119 aa, synthetic construct
  REGION 1..119: note = Description of Artificial Sequence: Synthetic polypeptide
EVQLVESGGGLVQPGRSLTLSCAASTNIMSISPMGWYRQAPGKQRELVAAIHGNSTLYADSVKGRFTISRDNAKNSIYLQMNSLRPEDTALYYCNKVPWGDYHPGNVYWGQGTQVTVSS

SEQ ID NO: 389 - protein, 119 aa, synthetic construct
  REGION 1..119: note = Description of Artificial Sequence: Synthetic polypeptide
EVQLVESGGGLVQPGRSLTLSCAASTNITSISPMGWYRQAPGKQRELVAAIHGNSTLYADSVKGRFTISRDNAKNSIYLQMNSLRPEDTALYYCNKVPWGDYHPGNVYWGQGTQVTVSS

SEQ ID NO: 390 - protein, 119 aa, synthetic construct
  REGION 1..119: note = Description of Artificial Sequence: Synthetic polypeptide
EVQLVESGGGLVQPGRSLTLSCAASTNIVSISPMGWYRQAPGKQRELVAAIHGHSTLYADSVKGRFTISRDNAKNSIYLQMNSLRPEDTALYYCNKVPWGDYHPGNVYWGQGTQVTVSS

SEQ ID NO: 391 - protein, 119 aa, synthetic construct
  REGION 1..119: note = Description of Artificial Sequence: Synthetic polypeptide
EVQLVESGGGLVQPGRSLTLSCAASTNIVSISPMGWYRQAPGKQRELVAAIHGKSTLYADSVKGRFTISRDNAKNSIYLQMNSLRPEDTALYYCNKVPWGDYHPGNVYWGQGTQVTVSS

SEQ ID NO: 392 - protein, 119 aa, synthetic construct
  REGION 1..119: note = Description of Artificial Sequence: Synthetic polypeptide
EVQLVESGGGLVQPGRSLTLSCAASTNVVSISPMGWYRQAPGKQRELVAAIHGKSTLYADSVKGRFTISRDNAKNSIYLQMNSLRPEDTALYYCNKVPWGDYHPNNVYWGQGTQVTVSS

SEQ ID NO: 393 - protein, 119 aa, synthetic construct
  REGION 1..119: note = Description of Artificial Sequence: Synthetic polypeptide
EVQLVESGGGLVQPGRSLTLSCAASTNIISISPMGWYRQAPGKQRELVAAIHGASTLYADSVKGRFTISRDNAKNSIYLQMNSLRPEDTALYYCNKVPWGDYHPGNVYWGQGTQVTVSS

SEQ ID NO: 394 - protein, 119 aa, synthetic construct
  REGION 1..119: note = Description of Artificial Sequence: Synthetic polypeptide
EVQLVESGGGLVQPGRSLTLSCAASTNIFSITPMGWYRQAPGKQRELVAAIHGASTLYADSVKGRFTISRDNAKNSIYLQMNSLRPEDTALYYCNKVPWGDYHPGNVYWGQGTQVTVSS

SEQ ID NO: 395 - protein, 119 aa, synthetic construct
  REGION 1..119: note = Description of Artificial Sequence: Synthetic polypeptide
EVQLVESGGGLVQPGRSLTLSCAASTNITSISPMGWYRQAPGKQRELVAAIHGFETLYADSVKGRFTISRDNAKNSIYLQMNSLRPEDTALYYCNKVPWGDYHPGNVYWGQGTQVTVSS

SEQ ID NO: 396 - protein, 119 aa, synthetic construct
  REGION 1..119: note = Description of Artificial Sequence: Synthetic polypeptide
EVQLVESGGGLVQPGRSLTLSCAASTNIQSISPMGWYRQAPGKQRELVAAIHGFETLYADSVKGRFTISRDNAKNSIYLQMNSLRPEDTALYYCNKVPWGDYHPGNVYWGQGTQVTVSS

SEQ ID NO: 397 - protein, 119 aa, synthetic construct
  REGION 1..119: note = Description of Artificial Sequence: Synthetic polypeptide
EVQLVESGGGLVQPGRSLTLSCAASTSDFSISPMGWYRQAPGKQRELVAAIHGFETLYADSVKGRFTISRDNAKNSIYLQMNSLRPEDTALYYCNKVPWGDYHPGNVYWGQGTQVTVSS

SEQ ID NO: 398 - protein, 119 aa, synthetic construct
  REGION 1..119: note = Description of Artificial Sequence: Synthetic polypeptide
EVQLVESGGGLVQPGRSLTLSCAASTNIDSISPMGWYRQAPGKQRELVAAIHGFQTLYADSVKGRFTISRDNAKNSIYLQMNSLRPEDTALYYCNKVPWGDYHPGNVYWGQGTQVTVSS

SEQ ID NO: 399 - protein, 119 aa, synthetic construct
  REGION 1..119: note = Description of Artificial Sequence: Synthetic polypeptide
EVQLVESGGGLVQPGRSLTLSCAASTNIMSISPMGWYRQAPGKQRELVAAIHGFSTVYADSVKGRFTISRDNAKNSIYLQMNSLRPEDTALYYCNKVPWGDYHPGNVYWGQGTQVTVSS

SEQ ID NO: 400 - protein, 119 aa, synthetic construct
  REGION 1..119: note = Description of Artificial Sequence: Synthetic polypeptide
EVQLVESGGGLVQPGRSLTLSCAASTNIESISPMGWYRQAPGKQRELVAAIHGFSTLYADSVKGRFTISRDNAKNSIYLQMNSLRPEDTALYYCNKVPWGDYHPGNVYWGQGTQVTVSS

SEQ ID NO: 401 - protein, 119 aa, synthetic construct
  REGION 1..119: note = Description of Artificial Sequence: Synthetic polypeptide
EVQLVESGGGLVQPGRSLTLSCAASTNIFSSSPMGWYRQAPGKQRELVAAIHGFKTLYADSVKGRFTISRDNAKNSIYLQMNSLRPEDTARYYCNKVPWGDYHPGNVYWGQGTQVTVSS

SEQ ID NO: 402 - protein, 119 aa, synthetic construct
  REGION 1..119: note = Description of Artificial Sequence: Synthetic polypeptide
EVQLVESGGGLVQPGRSLTLSCAASTNIFSSSPMGWYRQAPGKQRELVAAIHGFSTLYADSVKGRFTISRDNAKNSIYLQMNSLRPEDTALYYCNKVPWGDYHPGNVYWGQGTQVTVSS

SEQ ID NO: 403 - protein, 119 aa, synthetic construct
  REGION 1..119: note = Description of Artificial Sequence: Synthetic polypeptide
EVQLVESGGGLVQPGRSLTLSCAASTNIFSNSPMGWYRQAPGKQRELVAAIHGFSTLYADSVKGRFTISRDNAKNSIYLQMNSLRPEDTALYYCNKVPWGDYHPGNVYWGQGTQVTVSS

SEQ ID NO: 404 - protein, 119 aa, synthetic construct
  REGION 1..119: note = Description of Artificial Sequence: Synthetic polypeptide
EVQLVESGGGLVQPGRSLTLSCAASTNIFSTSPMGWYRQAPGKQRELVAAIHGFSTIYADSVKGRFTISRDNAKNSIYLQMNSLRPEDTALYYCNKVPWGDYHPGNVYWGQGTQVTVSS

SEQ ID NO: 405 - protein, 119 aa, synthetic construct
  REGION 1..119: note = Description of Artificial Sequence: Synthetic polypeptide
EVQLVESGGGLVQPGRSLTLSCAASTNIFSTSPMGWYRQAPGKQRELVAAIHGFSTIYADSVKGRFTISRDNAKNSIYLQMNSLRPEDTALYYCNKVPWGDYHPLNVYWGQGTQVTVSS

SEQ ID NO: 406 - protein, 119 aa, synthetic construct
  REGION 1..119: note = Description of Artificial Sequence: Synthetic polypeptide
EVQLVESGGGLVQPGRSLTLSCVASTNIFSTSPMGWYRQAPGKQRELVAAIHGFSTLYADSVKGRFTISRDNAKNSIYLQMNSLRPEDTALYYCNKVPWGDYHPGNVYWGQGTQVTVSS

SEQ ID NO: 407 - protein, 119 aa, synthetic construct
  REGION 1..119: note = Description of Artificial Sequence: Synthetic polypeptide
EVQLVESGGGLVQPGRSLTLSCAASTNIFSDSPMGWYRQAPGKQRELVAAIHGFSTFYADSVKGRFTISRDNAKNSIYLQMNSLRPEDTALYYCNKVPWGDYHPGNVYWGQGTQVTVSS

SEQ ID NO: 408 - protein, 119 aa, synthetic construct
  REGION 1..119: note = Description of Artificial Sequence: Synthetic polypeptide
EVQLVESGGGLVQPGRSLTLSCAASTNIFSQSPMGWYRQAPGKQRELVAAIHGDSTLYADSVKGRFTISRDNAKNSIYLQMNSLRPEDTALYYCNKVPWGDYHPGNVCWGQGTQVTVSS

SEQ ID NO: 409 - protein, 119 aa, synthetic construct
  REGION 1..119: note = Description of Artificial Sequence: Synthetic polypeptide
EVQLVESGGGLVQPGRSLTLSCAASTNIFSQSPMGWYRQAPGKQRELVAAIHGKSTLYADSVKGRFTISRDNAKNSIYLQMNSLRPEDTALYYCNKVPWGDYHPSNVYWGKGTQVTVSS

SEQ ID NO: 410 - protein, 119 aa, synthetic construct
  REGION 1..119: note = Description of Artificial Sequence: Synthetic polypeptide
EVQLVESGGGLVQPGRSLTLSCAASTNIFSRSPMGWYRQAPGKQRELVAAIHGESTLYADSVKGRFTISRDNAKNSIYLQMNSLRPEDTALYYCNKVPWGRYHPGNVYWGQGTQVTVSS

SEQ ID NO: 411 - protein, 119 aa, synthetic construct
  REGION 1..119: note = Description of Artificial Sequence: Synthetic polypeptide
EVQLVESGGGLVQPGRSLTLSCAASTNIFSRSPMGWYRQAPGKQRELVAAIHGISTLYADSVKGRFTISRDNAKNSIYLQMNSLRPEDTALYYCNKVPWGDYHPGNVYWGQGTQVTVSS

SEQ ID NO: 412 - protein, 119 aa, synthetic construct
  REGION 1..119: note = Description of Artificial Sequence: Synthetic polypeptide
EVQLVESGGGLVQPGRSLTLSCAASTNIFSRSPMGWYRQAPGKQRELVAAIHGSSTLYADSVKGRFTISRDNAKNSIYLQMNSLRPEDTALYYCNKVPWGDYHPGNVYWGQGTQVTVSS

SEQ ID NO: 413 - protein, 119 aa, synthetic construct
  REGION 1..119: note = Description of Artificial Sequence: Synthetic polypeptide
EVQLVESGGGLVQPGRSLTLSCAASTNIFSGSPMGWYRQAPGKQRELVAAIHGNSTLYADSVKGRFTISRDNAKNSIYLQMNSLRPEDTALYYCNKVPWGDYHPGNVYWGQGTQVTVSS

SEQ ID NO: 414 - protein, 119 aa, synthetic construct
  REGION 1..119: note = Description of Artificial Sequence: Synthetic polypeptide
EVQLVESGGGLVQPGRSLTLSCAASSNIFSISPMGWYRQAPGKQRELVAAIHGSSTLYADSVKGRFTISRDNAKNSIYLQMNSLRPEDTALYYCNKVPWGDYHPGNVYWGQGTQVTVSS

SEQ ID NO: 415 - protein, 119 aa, synthetic construct
  REGION 1..119: note = Description of Artificial Sequence: Synthetic polypeptide
EVQLVESGGGLVQPGRSLTLSCAASTNIFSIYPMGWYRQAPGKQRELVAAIHGSSTLYADSVKGRFTISRDNAKNSIYLQMNSLRPEDTALYYCNKVPWGDYHPKNVYWGQGTQVTVSS

SEQ ID NO: 416 - protein, 119 aa, synthetic construct
  REGION 1..119: note = Description of Artificial Sequence: Synthetic polypeptide
EVQLVESGGGLVQPGRSLTLSCAASTNIFSKSPMGWYRQAPGKQRELVAAIHGSSTLYADSVKGRFTISRDNAKNSIYLQMNSLRPEDTALYYCNKVPWGDYHPGNVYWGQGTQVTVSS

SEQ ID NO: 417 - protein, 119 aa, synthetic construct
  REGION 1..119: note = Description of Artificial Sequence: Synthetic polypeptide
EVQLVESGGGLVQPGRSLTLSCAASTNIFSKSPMGWYRQAPGKQRELVAAIHGSSTLYADSVKGRFTISRDNAKNSIYLQMNSLRPEDTALYYCNKVPWGDYHPRNVYWGQGTQVTVSS

SEQ ID NO: 418 - protein, 119 aa, synthetic construct
  REGION 1..119: note = Description of Artificial Sequence: Synthetic polypeptide
EVQLVESGGGLVQPGRSLTLSCAASTNEFSISPMGWYRQAPGKQRELVAAIHGLSTLYADSVKGRFTISRDNAKNSIYLQMNSLRPEDTALYYCNKVPWGAYHPRNVYWGQGTQVTVSS

SEQ ID NO: 419 - protein, 119 aa, synthetic construct
  REGION 1..119: note = Description of Artificial Sequence: Synthetic polypeptide
EVQLVESGGGLVQPGRSLTLSCAASTNEFSISPMGWYRQAPGKQRELVAAIHGESTLYADSVKGRFTISRDNAKNSIYLQMNSLRPEDTALYYCNKVPWGDYHPGNVYWGQGTQVTVSS

SEQ ID NO: 420 - protein, 119 aa, synthetic construct
  REGION 1..119: note = Description of Artificial Sequence: Synthetic polypeptide
EVQLVESGGGLVQPGRSLTLSCAASTNIPSISPMGWYRQAPGKQRELVAAIHGESTLYADSVKGRFTISRDNAKNSIYLQMNSLRPEDTALYYCNKVPWGDYHPRNVAWGQGTQVTVSS

SEQ ID NO: 421 - protein, 119 aa, synthetic construct
  REGION 1..119: note = Description of Artificial Sequence: Synthetic polypeptide
EVQLVESGGGLVQPGRSLTLSCAASTNIPSISPMGWYRQAPGKQRELVAAIHGASTLYADSVKGRFTISRDNAKNSIYLQMNSLRPEDTALYYCNKVPWGDYHPRNVAWGQGTQVTVSS

SEQ ID NO: 422 - protein, 119 aa, synthetic construct
  REGION 1..119: note = Description of Artificial Sequence: Synthetic polypeptide
EVQLVESGGGLVQPGRSLTLSCAASTNIPSISPMGWYRQAPGKQRELVAAIHGESTLYADSVKGRFTISRDNAKNSIYLQMNSLRPEDTALYYCNKVPWGDYHPRNVYWGQGTQVTVSS

SEQ ID NO: 423 - protein, 119 aa, synthetic construct
  REGION 1..119: note = Description of Artificial Sequence: Synthetic polypeptide
EVQLVESGGGLVQPGRSLTLSCAASTNIPSISPMGWYRQAPGKQRELVAAIHGDSTLYADSVKGRFTISRDNAKNSIYLQMNSLRPEDTALYYCNKVPWGDYHPRNVYWGQGTQVTVSS

SEQ ID NO: 424 - protein, 119 aa, synthetic construct
  REGION 1..119: note = Description of Artificial Sequence: Synthetic polypeptide
EVQLVESGGGLVQPGRSLTLSCAASTNITSISPMGWYRQAPGKQRELVAAIHGVSTLYADSVKGRFTISRDNAKNSIYLQMNSLRPEDTALYYCNKVPWGDYHPRNVQWGQGTQVTVSS

SEQ ID NO: 425 - protein, 119 aa, synthetic construct
  REGION 1..119: note = Description of Artificial Sequence: Synthetic polypeptide
EVQLVESGGGLVQPGRSLTLSCAASTNIPSISPMGWYRQAPGKQRELVAAIHGQSTLYADSVKGRFTISRDNAKNSIYLQMNSLRPEDTALYYCNKVPWGDYHPRNVQWGQGTQVTVSS

SEQ ID NO: 426 - protein, 119 aa, synthetic construct
  REGION 1..119: note = Description of Artificial Sequence: Synthetic polypeptide
EVQLVESGGGLVQPGRSLTLSCAASTNIVSISPMGWYRQAPGKQRELVAAIHGDSTLYADSVKGRFTISRDNAKNSIYLQMNSLRPEDTALYYCNKVPWGDYHPRNVSWGQGTQVTVSS

SEQ ID NO: 427 - protein, 119 aa, synthetic construct
  REGION 1..119: note = Description of Artificial Sequence: Synthetic polypeptide
EVQLVESGGGLVQPGRSLTLSCAASSNIFSISPMGWYRQAPGKQRELVAAIHGESTLYADSVKGRFTISRDNAKNSIYLQMNSLRPEDTALYYCNKVPWGDYHPRNVTWGQGTQVTVSS

SEQ ID NO: 428 - protein, 119 aa, synthetic construct
  REGION 1..119: note = Description of Artificial Sequence: Synthetic polypeptide
EVQLVESGGGLVQPGRSLTLSCAASTNIDSISPMGWYRQAPGKQRELVAAIHGESTLYADSVKGRFTISRDNAKNSIYLQMNSLRPEDTALYYCNKVPWGDYHPRNVTWGQGTQVTVSS

SEQ ID NO: 429 - protein, 119 aa, synthetic construct
  REGION 1..119: note = Description of Artificial Sequence: Synthetic polypeptide
EVQLVESGGGLVQPGRSLTLSCAASTNIDSISPMGWYRQAPGKQRELVAAIHGSSTLYADSVKGRFTISRDNAKNSIYLQMNSLRPEDTALYYCNKVPWGDYHPRNVTWGQGTQVTVSS

SEQ ID NO: 430 - protein, 119 aa, synthetic construct
  REGION 1..119: note = Description of Artificial Sequence: Synthetic polypeptide
EVQLVESGGGLVQPGRSLTLSCAASTNIRSISPMGWYRQAPGKQRELVAAIHGSSTLYADSVKGRFTISRDNAKNSIYLQMNSLRPEDTALYYCNKVPWGDYHPRNVVWGQGTQVTVSS

SEQ ID NO: 431 - protein, 119 aa, synthetic construct
  REGION 1..119: note = Description of Artificial Sequence: Synthetic polypeptide
EVQLVESGGGLVQPGRSLTLSCAASTNITSISPMGWYRQAPGKQRELVAAISGFSTLYADSVKGRFTISRDNAKNSIYLQMNSLRPEDTALYYCNEVPWGDYHPRNVYWGQGTQVTVSS

SEQ ID NO: 432 - protein, 119 aa, synthetic construct
  REGION 1..119: note = Description of Artificial Sequence: Synthetic polypeptide
EVQLVESGGGLVQPGRSLTLSCAASTNITSISPMGWYRQAPGKQRELVAAIHGESTLYADSVKGRFTISRDNAKNSIYLQMNSLRPEDTALYYCNKVPWGDYHPRNVYWGQGTQVTVSS

SEQ ID NO: 433 - protein, 119 aa, synthetic construct
  REGION 1..119: note = Description of Artificial Sequence: Synthetic polypeptide
EVQLVESGGGLVQPGRSLTLSCAASTNITSVSPMGWYRQAPGKQRELVAAIHGPSTLYADSVKGRFTISRDNAKNSIYLQMNSLRPEDTALYYCNKVPWGDYHPTNVYWGQGTQVTVSS

SEQ ID NO: 434 - protein, 119 aa, synthetic construct
  REGION 1..119: note = Description of Artificial Sequence: Synthetic polypeptide
EVQLVESGGGLVQPGRSLTLSCAASTNIGSISPMGWYRQAPGKQRELVAAIHGQSTLYADSVKGRFTISRDNAKNSIYLQMNSLRPEDTALYYCNKVPWGDYHPQNVYWGQGTQVTVSS

SEQ ID NO: 435 - protein, 119 aa, synthetic construct
  REGION 1..119: note = Description of Artificial Sequence: Synthetic polypeptide
EVQLVESGGGLVQPGRSLTLSCAASTNIESISPMGWYRQAPGKQRELVAAIHGKSTLYADSVKGRFTISRDNAKNSIYLQMNSLRPEDTALYYCNKVPWGDYHPRRVYWGQGTQVTVSS

SEQ ID NO: 436 - protein, 119 aa, synthetic construct
  REGION 1..119: note = Description of Artificial Sequence: Synthetic polypeptide
EVQLVESGGGLVQPGRSLTLSCAASTNIVSISPMGWYRQAPGKQRELVAAIHGDSTLYADSVKGRFTISRDNAKNSIYLQMNSLRPEDTALYYCNKVPWGDYHPRRVYWGQGTQVTVSS

SEQ ID NO: 437 - protein, 119 aa, synthetic construct
  REGION 1..119: note = Description of Artificial Sequence: Synthetic polypeptide
EVQLVESGGGLVQPGRSLTLSCAASTNIDSISPMGWYRQAPGKQRELVAAIHGNSTLYADSVKGRFTISRDNAKNSIYLQMNSLRPEDTALYYCNKVPWGDYHPRMVYWGQGTQVTVSS

SEQ ID NO: 438 - protein, 119 aa, synthetic construct
  REGION 1..119: note = Description of Artificial Sequence: Synthetic polypeptide
EVQLVESGGGLVQPGRSLTLSCAASTNIFMISPMGWYRQAPGKQRELVAAIHGDSTLYADSVKGRFTISRDNAKNSIYLQMNSLRPEDTALYYCNKVPWGRYHPRNVYWGQGTQVTVSS

SEQ ID NO: 439 - protein, 119 aa, synthetic construct
  REGION 1..119: note = Description of Artificial Sequence: Synthetic polypeptide
EVQLVESGGGLVQPGRSLTLSCAASTNIFRISPMGWYRQAPGKQRELVAAIHGDSTLYADSVKGRFTISRDNAKNSIYLQMNSLRPEDTALYYCNKVPWGRYHPRNVYWGQGTQVTVSS

SEQ ID NO: 440 - protein, 119 aa, synthetic construct
  REGION 1..119: note = Description of Artificial Sequence: Synthetic polypeptide
EVQLVESGGGLVQPGRSLTLSCAASTNIFSISPMGWYRQAPGKQRELVAAIHGDSTLYADSVKGRFTISRDNAKNSIYLQMNSLRPEDTALYYCNKVPWGEYHPRNVYWGQGTQVTVSS

SEQ ID NO: 441 - protein, 119 aa, synthetic construct
  REGION 1..119: note = Description of Artificial Sequence: Synthetic polypeptide
EVQLVESGGGLVQPGRSLTLSCAASTNIFSISPMGWYRQAPGKQRELVAAIHGDSTLYADSVKGRFTISRDNAKNSIYLQMNSLRPEDTALYYCNKVPWGKYHPRNVYWGQGTQVTVSS

SEQ ID NO: 442 - protein, 119 aa, synthetic construct
  REGION 1..119: note = Description of Artificial Sequence: Synthetic polypeptide
EVQLVESGGGLVQPGRSLTLSCAASTNIESISPMGWYRQAPGKQRELVAAIHGSSTLYADSVKGRFTISRDNAKNSIYLQMNSLRPEDTALYYCNKVPWGRYHPRNVYWGQGTQVTVSS

SEQ ID NO: 443 - protein, 119 aa, synthetic construct
  REGION 1..119: note = Description of Artificial Sequence: Synthetic polypeptide
EVQLVESGGGLVQPGRSLTLSCAASTNIESISPMGWYRQAPGKQRELVAAIHGNSTLYADSVKGRFTISRDNAKNSIYLQMNSLRPEDTALYYCNKVPWGRYHPRNVYWGQGTQVTVSS

SEQ ID NO: 444 - protein, 119 aa, synthetic construct
  REGION 1..119: note = Description of Artificial Sequence: Synthetic polypeptide
EVQLVESGGGLVQPGRSLTLSCAASTNISSISPMGWYRQAPGKQRELVAAIHGFSTLYADSVKGRFTISRDNAKNSIYLQMNSLRPEDTALYYCNKVPWGYYHPRNVYWGQGTQVTVSS

SEQ ID NO: 445 - protein, 119 aa, synthetic construct
  REGION 1..119: note = Description of Artificial Sequence: Synthetic polypeptide
EVQLVESGGGLVQPGRSLTLSCAASTNISSISPMGWYRQAPGKQRELVAAIHGHSTLYADSVKGRFTISRDNAKNSIYLQMNSLRPEDTALYYCNKVPWGRYHPRNVYWGQGTQVTVSS

SEQ ID NO: 446 - protein, 119 aa, synthetic construct
  REGION 1..119: note = Description of Artificial Sequence: Synthetic polypeptide
EVQLVESGGGLVQPGRSLTLSCAASTNISSISPMGWYRQAPGKQRELVAAIHGFSTVYADSVKGRFTISRDNAKNSIYLQMNSLRPEDTALYYCNKVPWGRYHPRNVYWGQGTQVTVSS

SEQ ID NO: 447 - protein, 119 aa, synthetic construct
  REGION 1..119: note = Description of Artificial Sequence: Synthetic polypeptide
EVQLVESGGGLVQPGRSLTLSCAASTNIFSIRPMGWYRQAPGKQRELVAAIHGFSTVYADSVKGRFTISRDNAKNSIYLQMNSLRPEDTALYYCNKVPWGDYHPRNVYWGQGTQVTVSS

SEQ ID NO: 448 - protein, 119 aa, synthetic construct
  REGION 1..119: note = Description of Artificial Sequence: Synthetic polypeptide
EVQLVESGGGLVQPGRSLTLSCAASTNIFSIYPMGWYRQAPGKQRELVAAIHGFSTYYADSVKGRFTISRDNAKNSIYLQMNSLRPEDTALYYCNKVPWGSYHPRNVYWGQGTQVTVSS

SEQ ID NO: 449 - protein, 119 aa, synthetic construct
  REGION 1..119: note = Description of Artificial Sequence: Synthetic polypeptide
EVQLVESGGGLVQPGRSLTLSCAASTNIFNISPMGWYRQAPGKQRELVAAIHGFSTYYADSVKGRFTISRDNAKNSIYLQMNSLRPEDTALYYCNKVPWGRYHPRNVYWGQGTQVTVSS

SEQ ID NO: 450 - protein, 119 aa, synthetic construct
  REGION 1..119: note = Description of Artificial Sequence: Synthetic polypeptide
EVQLVESGGGLVQPGRSLTLSCAASTNIFSSSPMGWYRQAPGKQRELVAAIHGFSTWYADSVKGRFTISRDNAKNSIYLQMNSLRPEDTALYYCNKVPWGRYHPRNVYWGQGTQVTVSS

SEQ ID NO: 451 - protein, 119 aa, synthetic construct
  REGION 1..119: note = Description of Artificial Sequence: Synthetic polypeptide
EVQLVESGGGLVQPGRSLTLSCAASTNISSISPMGWYRQAPGKQRELVAAIHGFDTLYADSVKGRFTISRDNAKNSIYLQMNSLRPEDTALYYCNKVPWGDYHPRNVYWGQGTQVTVSS

SEQ ID NO: 452 - protein, 119 aa, synthetic construct
  REGION 1..119: note = Description of Artificial Sequence: Synthetic polypeptide
EVQLVESGGGLVQPGRSLTLSCAASTNIFSINPMGWYRQAPGKQRELVAAIHGFDTLYADSVKGRFTISRDNAKNSIYLQMNSLRPEDTALYYCNKVPWGDYHPRNVSWGQGTQVTVSS

SEQ ID NO: 453 - protein, 119 aa, synthetic construct
  REGION 1..119: note = Description of Artificial Sequence: Synthetic polypeptide
EVQLVESGGGLVQPGRSLTLSCAASTNIFSITPMGWYRQAPGKQRELVAAIHGRSTLYADSVKGRFTISRDNAKNSIYLQMNSLRPEDTALYYCNKVPWGSYHPRNVYWGQGTQVTVSS

SEQ ID NO: 454 - protein, 119 aa, synthetic construct
  REGION 1..119: note = Description of Artificial Sequence: Synthetic polypeptide
EVQLVESGGGLVQPGRSLTLSCAASTNIFSITPMGWYRQAPGKQRELVAAIHGTSTLYADSVKGRFTISRDNAKNSIYLQMNSLRPEDTALYYCNKVPWGRYHPRNVYWGQGTQVTVSS

SEQ ID NO: 455 - protein, 119 aa, synthetic construct
  REGION 1..119: note = Description of Artificial Sequence: Synthetic polypeptide
EVQLVESGGGLVQPGRSLTLSCAASTNIFSITPMGWYRQAPGKQRELVAAIHGESTLYADSVKGRFTISRDNAKNSIYLQMNSLRPEDTALYYCNKVPWGRYHPRNVYWGQGTQVTVSS

SEQ ID NO: 456 - protein, 119 aa, synthetic construct
  REGION 1..119: note = Description of Artificial Sequence: Synthetic polypeptide
EVQLVESGGGLVQPGRSLTLSCAASTNIFSITPMGWYRQAPGKQRELVAAIHGESTLYADSVKGRFTISRDNAKNSIYLQMNSLRPEDTALYYCNKVPWGDYHPRDVYWGQGTQVTVSS

SEQ ID NO: 457 - protein, 119 aa, synthetic construct
  REGION 1..119: note = Description of Artificial Sequence: Synthetic polypeptide
EVQLVESGGGLVQPGRSLTLSCAASTNIFSTSPYGWYRQAPGKQRELVAAIHGFSTIYADSVKGRFTISRDNAKNSIYLQMNSLRPEDTALYYCNKVPWGDYHPGNVYWGQGTQVTVSS

SEQ ID NO: 458 - protein, 119 aa, synthetic construct
  REGION 1..119: note = Description of Artificial Sequence: Synthetic polypeptide
EVQLVESGGGLVQPGRSLTLSCAASTNIFSTSPGGWYRQAPGKQRELVAAIHGFSTIYADSVKGRFTISRDNAKNSIYLQMNSLRPEDTALYYCNKVPWGDYHPGNVYWGQGTQVTVSS

SEQ ID NO: 459 - protein, 119 aa, synthetic construct
  REGION 1..119: note = Description of Artificial Sequence: Synthetic polypeptide
EVQLVESGGGLVQPGRSLTLSCAASTNIFSITPYGWYRQAPGKQRELVAAIHGASTLYADSVKGRFTISRDNAKNSIYLQMNSLRPEDTALYYCNKVPWGDYHPGNVYWGQGTQVTVSS

SEQ ID NO: 460 - protein, 119 aa, synthetic construct
  REGION 1..119: note = Description of Artificial Sequence: Synthetic polypeptide
EVQLVESGGGLVQPGRSLTLSCAASTNIFSITPGGWYRQAPGKQRELVAAIHGASTLYADSVKGRFTISRDNAKNSIYLQMNSLRPEDTALYYCNKVPWGDYHPGNVYWGQGTQVTVSS

SEQ ID NO: 461 - protein, 119 aa, synthetic construct
  REGION 1..119: note = Description of Artificial Sequence: Synthetic polypeptide
QVQLVESGGGLVQPGESLRLSCAASTNIFSISPMGWYRQAPGKQRELVAAIHGFSTLYADSVKGRFTISRDNAKNTIYLQMNSLKPEDTAVYYCNKVPWGDYHPRNVYWGQGTQVTVSS

SEQ ID NO: 462 - protein, 10 aa, synthetic construct
  REGION 1..10: note = Description of Artificial Sequence: Synthetic peptide
RFMISEYHMH

SEQ ID NO: 463 - protein, 10 aa, synthetic construct
  REGION 1..10: note = Description of Artificial Sequence: Synthetic peptide
RFMISPYSMH

SEQ ID NO: 464 - protein, 10 aa, synthetic construct
  REGION 1..10: note = Description of Artificial Sequence: Synthetic peptide
RFMISPYHMH

SEQ ID NO: 465 - protein, 10 aa, synthetic construct
  REGION 1..10: note = Description of Artificial Sequence: Synthetic peptide
RFMISEYSMH

SEQ ID NO: 466 - protein, 16 aa, synthetic construct
  REGION 1..16: note = Description of Artificial Sequence: Synthetic peptide
DINPAGTTDYAESVKG

SEQ ID NO: 467 - protein, 16 aa, synthetic construct
  REGION 1..16: note = Description of Artificial Sequence: Synthetic peptide
TINPAKTTDYAESVKG

SEQ ID NO: 468 - protein, 16 aa, synthetic construct
  REGION 1..16: note = Description of Artificial Sequence: Synthetic peptide
TINPAGQTDYAESVKG

SEQ ID NO: 469 - protein, 16 aa, synthetic construct
  REGION 1..16: note = Description of Artificial Sequence: Synthetic peptide
TINPAGTTDYAEYVKG

SEQ ID NO: 470 - protein, 16 aa, synthetic construct
  REGION 1..16: note = Description of Artificial Sequence: Synthetic peptide
DINPAKTTDYAESVKG

SEQ ID NO: 471 - protein, 16 aa, synthetic construct
  REGION 1..16: note = Description of Artificial Sequence: Synthetic peptide
DINPAGQTDYAESVKG

SEQ ID NO: 472 - protein, 16 aa, synthetic construct
  REGION 1..16: note = Description of Artificial Sequence: Synthetic peptide
DINPAGTTDYAEYVKG

SEQ ID NO: 473 - protein, 16 aa, synthetic construct
  REGION 1..16: note = Description of Artificial Sequence: Synthetic peptide
TINPAGTTDYAESVKG

SEQ ID NO: 474 - protein, 5 aa, synthetic construct
  REGION 1..5: note = Description of Artificial Sequence: Synthetic peptide
DSYGY

SEQ ID NO: 475 - protein, 5 aa, synthetic construct
  REGION 1..5: note = Description of Artificial Sequence: Synthetic peptide
DGYGY

SEQ ID NO: 476 - protein, 111 aa, synthetic construct
  REGION 1..111: note = Description of Artificial Sequence: Synthetic polypeptide
EVQLVESGGGLVQPGGSLTLSCAASRFMISEYSMHWVRQAPGKGLEWVSTINPAGTTDYAESVKGRFTISRDNAKNTLYLQMNSLKPEDTAVYYCDGYGYRGQGTQVTVSS

SEQ ID NO: 477 - protein, 111 aa, synthetic construct
  REGION 1..111: note = Description of Artificial Sequence: Synthetic polypeptide
EVQLVESGGGLVQPGGSLRLSCAASRFMISEYSMHWVRQAPGKGLEWVSTINPAGTTDYAESVKGRFTISRDNAKNTLYLQMNSLRAEDTAVYYCDGYGYRGQGTLVTVSS

SEQ ID NO: 478 - protein, 111 aa, synthetic construct
  REGION 1..111: note = Description of Artificial Sequence: Synthetic polypeptide
EVQLVESGGGLVQPGGSLRLSCAASRFMISEYHMHWVRQAPGKGLEWVSDINPAGTTDYAESVKGRFTISRDNAKNTLYLQMNSLRAEDTAVYYCDSYGYRGQGTLVTVSS

SEQ ID NO: 479 - protein, 111 aa, synthetic construct
  REGION 1..111: note = Description of Artificial Sequence: Synthetic polypeptide
EVQLVESGGGLVQPGGSLRLSCAASRFMISEYHMHWVRQAPGKGLEWVSTINPAGTTDYAESVKGRFTISRDNAKNTLYLQMNSLRAEDTAVYYCDSYGYRGQGTLVTVSS

SEQ ID NO: 480 - protein, 111 aa, synthetic construct
  REGION 1..111: note = Description of Artificial Sequence: Synthetic polypeptide
EVQLVESGGGLVQPGGSLRLSCAASRFMISEYSMHWVRQAPGKGLEWVSTINPAKTTDYAESVKGRFTISRDNAKNTLYLQMNSLRAEDTAVYYCDSYGYRGQGTLVTVSS

SEQ ID NO: 481 - protein, 111 aa, synthetic construct
  REGION 1..111: note = Description of Artificial Sequence: Synthetic polypeptide
EVQLVESGGGLVQPGGSLRLSCAASRFMISPYSMHWVRQAPGKGLEWVSTINPAGTTDYAESVKGRFTISRDNAKNTLYLQMNSLRAEDTAVYYCDGYGYRGQGTLVTVSS

SEQ ID NO: 482 - protein, 111 aa, synthetic construct
  REGION 1..111: note = Description of Artificial Sequence: Synthetic polypeptide
EVQLVESGGGLVQPGGSLRLSCAASRFMISEYSMHWVRQAPGKGLEWVSTINPAGQTDYAESVKGRFTISRDNAKNTLYLQMNSLRAEDTAVYYCDGYGYRGQGTLVTVSS

SEQ ID NO: 483 - protein, 111 aa, synthetic construct
  REGION 1..111: note = Description of Artificial Sequence: Synthetic polypeptide
EVQLVESGGGLVQPGGSLRLSCAASRFMISEYSMHWVRQAPGKGLEWVSTINPAGTTDYAEYVKGRFTISRDNAKNTLYLQMNSLRAEDTAVYYCDGYGYRGQGTLVTVSS

SEQ ID NO: 484 - protein, 111 aa, synthetic construct
  REGION 1..111: note = Description of Artificial Sequence: Synthetic polypeptide
EVQLVESGGGLVQPGGSLRLSCAASRFMISEYHMHWVRQAPGKGLEWVSDINPAKTTDYAESVKGRFTISRDNAKNTLYLQMNSLRAEDTAVYYCDSYGYRGQGTLVTVSS

SEQ ID NO: 485 - protein, 111 aa, synthetic construct
  REGION 1..111: note = Description of Artificial Sequence: Synthetic polypeptide
EVQLVESGGGLVQPGGSLRLSCAASRFMISPYHMHWVRQAPGKGLEWVSDINPAGTTDYAESVKGRFTISRDNAKNTLYLQMNSLRAEDTAVYYCDSYGYRGQGTLVTVSS

SEQ ID NO: 486 - protein, 111 aa, synthetic construct
  REGION 1..111: note = Description of Artificial Sequence: Synthetic polypeptide
EVQLVESGGGLVQPGGSLRLSCAASRFMISEYHMHWVRQAPGKGLEWVSDINPAGQTDYAESVKGRFTISRDNAKNTLYLQMNSLRAEDTAVYYCDSYGYRGQGTLVTVSS

SEQ ID NO: 487 - protein, 111 aa, synthetic construct
  REGION 1..111: note = Description of Artificial Sequence: Synthetic polypeptide
EVQLVESGGGLVQPGGSLRLSCAASRFMISEYHMHWVRQAPGKGLEWVSDINPAGTTDYAEYVKGRFTISRDNAKNTLYLQMNSLRAEDTAVYYCDSYGYRGQGTLVTVSS

SEQ ID NO: 488 - protein, 111 aa, synthetic construct
  REGION 1..111: note = Description of Artificial Sequence: Synthetic polypeptide
EVQLVESGGGLVQPGGSLTLSCAASRFMISEYHMHWVRQAPGKGLEWVSDINPAGTTDYAESVKGRFTISRDNAKNTLYLQMNSLKPEDTAVYYCDSYGYRGQGTQVTVSS

SEQ ID NO: 489 - protein, 111 aa, synthetic construct
  REGION 1..111: note = Description of Artificial Sequence: Synthetic polypeptide
EVQLVESGGGLVQPGGSLTLSCAASRFMISEYHMHWVRQAPGKGLEWVSTINPAGTTDYAESVKGRFTISRDNAKNTLYLQMNSLKPEDTAVYYCDSYGYRGQGTQVTVSS

SEQ ID NO: 490 - protein, 10 aa, synthetic construct
  REGION 1..10: note = Description of Artificial Sequence: Synthetic peptide
GRTFSVRGMA

SEQ ID NO: 491 - protein, 10 aa, synthetic construct
  REGION 1..10: note = Description of Artificial Sequence: Synthetic peptide
GSIPSIEQMG

SEQ ID NO: 492 - protein, 10 aa, synthetic construct
  REGION 1..10: note = Description of Artificial Sequence: Synthetic peptide
GTTYTFDLMS

SEQ ID NO: 493 - protein, 10 aa, synthetic construct
  REGION 1..10: note = Description of Artificial Sequence: Synthetic peptide
GSTSNINNMR

SEQ ID NO: 494 - protein, 10 aa, synthetic construct
  REGION 1..10: note = Description of Artificial Sequence: Synthetic peptide
GSTFGINAMG

SEQ ID NO: 495 - protein, 10 aa, synthetic construct
  REGION 1..10: note = Description of Artificial Sequence: Synthetic peptide
ISAFRLMSVR

SEQ ID NO: 496 - protein, 10 aa, synthetic construct
  REGION 1..10: note = Description of Artificial Sequence: Synthetic peptide
GRPFSINTMG

SEQ ID NO: 497 - protein, 10 aa, synthetic construct
  REGION 1..10: note = Description of Artificial Sequence: Synthetic peptide
GSDFTEDAMA

SEQ ID NO: 498 - protein, 10 aa, synthetic construct
  REGION 1..10: note = Description of Artificial Sequence: Synthetic peptide
GSDFTEDAMA

SEQ ID NO: 499 - protein, 10 aa, synthetic construct
  REGION 1..10: note = Description of Artificial Sequence: Synthetic peptide
GFTFSSFGMS

SEQ ID NO: 500 - protein, 10 aa, synthetic construct
  REGION 1..10: note = Description of Artificial Sequence: Synthetic peptide
GLTYSIVAVG

SEQ ID NO: 501 - protein, 10 aa, synthetic construct
  REGION 1..10: note = Description of Artificial Sequence: Synthetic peptide
GLTFGVYGME

SEQ ID NO: 502 - protein, 9 aa, synthetic construct
  REGION 1..9: note = Description of Artificial Sequence: Synthetic peptide
TTSSINSMS

SEQ ID NO: 503 - protein, 10 aa, synthetic construct
  REGION 1..10: note = Description of Artificial Sequence: Synthetic peptide
GRTLSRYAMG

SEQ ID NO: 504 - protein, 10 aa, synthetic construct
  REGION 1..10: note = Description of Artificial Sequence: Synthetic peptide
GSIFSPNAMI

SEQ ID NO: 505 - protein, 10 aa, synthetic construct
  REGION 1..10: note = Description of Artificial Sequence: Synthetic peptide
GATSAITNLG

SEQ ID NO: 506 - protein, 10 aa, synthetic construct
  REGION 1..10: note = Description of Artificial Sequence: Synthetic peptide
GSTFRIRVMR

SEQ ID NO: 507 - protein, 10 aa, synthetic construct
  REGION 1..10: note = Description of Artificial Sequence: Synthetic peptide
GDTSKFKAVG

SEQ ID NO: 508 - protein, 10 aa, synthetic construct
  REGION 1..10: note = Description of Artificial Sequence: Synthetic peptide
GSTFGNKPMG

SEQ ID NO: 509 - protein, 10 aa, synthetic construct
  REGION 1..10: note = Description of Artificial Sequence: Synthetic peptide
GSTSSINTMY

SEQ ID NO: 510 - protein, 10 aa, synthetic construct
  REGION 1..10: note = Description of Artificial Sequence: Synthetic peptide
GRTDRITTMG

SEQ ID NO: 511 - protein, 10 aa, synthetic construct
  REGION 1..10: note = Description of Artificial Sequence: Synthetic peptide
GRTIGINDMA

SEQ ID NO: 512 - protein, 9 aa, synthetic construct
  REGION 1..9: note = Description of Artificial Sequence: Synthetic peptide
AIGSINSMS

SEQ ID NO: 513 - protein, 10 aa, synthetic construct
  REGION 1..10: note = Description of Artificial Sequence: Synthetic peptide
GSTSSINTMY

SEQ ID NO: 514 - protein, 9 aa, synthetic construct
  REGION 1..9: note = Description of Artificial Sequence: Synthetic peptide
TTFSINSMS

SEQ ID NO: 515 - protein, 10 aa, synthetic construct
  REGION 1..10: note = Description of Artificial Sequence: Synthetic peptide
GSTFSIRAMR

SEQ ID NO: 516 - protein, 10 aa, synthetic construct
  REGION 1..10: note = Description of Artificial Sequence: Synthetic peptide
GRTSTIDTMY

SEQ ID NO: 517 - protein, 10 aa, synthetic construct
  REGION 1..10: note = Description of Artificial Sequence: Synthetic peptide
GSTSSINTMY

SEQ ID NO: 518 - protein, 10 aa, synthetic construct
  REGION 1..10: note = Description of Artificial Sequence: Synthetic peptide
GGDWSANFMY

SEQ ID NO: 519 - protein, 10 aa, synthetic construct
  REGION 1..10: note = Description of Artificial Sequence: Synthetic peptide
GGDWSANFMY

SEQ ID NO: 520 - protein, 10 aa, synthetic construct
  REGION 1..10: note = Description of Artificial Sequence: Synthetic peptide
GSTSSINTMY

SEQ ID NO: 521 - protein, 10 aa, synthetic construct
  REGION 1..10: note = Description of Artificial Sequence: Synthetic peptide
GSTSSINTMY

SEQ ID NO: 522 - protein, 10 aa, synthetic construct
  REGION 1..10: note = Description of Artificial Sequence: Synthetic peptide
GSTSSINTMY

SEQ ID NO: 523 - protein, 10 aa, synthetic construct
  REGION 1..10: note = Description of Artificial Sequence: Synthetic peptide
GSTFSIRAMR

SEQ ID NO: 524 - protein, 10 aa, synthetic construct
  REGION 1..10: note = Description of Artificial Sequence: Synthetic peptide
GSTFSIRAMR

SEQ ID NO: 525 - protein, 10 aa, synthetic construct
  REGION 1..10: note = Description of Artificial Sequence: Synthetic peptide
GSTFSIRAMR

SEQ ID NO: 526 - protein, 10 aa, synthetic construct
  REGION 1..10: note = Description of Artificial Sequence: Synthetic peptide
GRTSTIDTMY

SEQ ID NO: 527 - protein, 10 aa, synthetic construct
  REGION 1..10: note = Description of Artificial Sequence: Synthetic peptide
GRTSTIDTMY

SEQ ID NO: 528 - protein, 10 aa, synthetic construct
  REGION 1..10: note = Description of Artificial Sequence: Synthetic peptide
GRTSTIDTMY

SEQ ID NO: 529 - protein, 19 aa, synthetic construct
  REGION 1..19: note = Description of Artificial Sequence: Synthetic peptide
TMNPDGFPNYADAVKGRFT

SEQ ID NO: 530 - protein, 19 aa, synthetic construct
  REGION 1..19: note = Description of Artificial Sequence: Synthetic peptide
ALTSGGRANYADSVKGRFT

SEQ ID NO: 531 - protein, 19 aa, synthetic construct
  REGION 1..19: note = Description of Artificial Sequence: Synthetic peptide
SISSDGRTSYADSVRGRFT

SEQ ID NO: 532 - protein, 19 aa, synthetic construct
  REGION 1..19: note = Description of Artificial Sequence: Synthetic peptide
VITRGGYAIYLDAVKGRFT

SEQ ID NO: 533 - protein, 19 aa, synthetic construct
  REGION 1..19: note = Description of Artificial Sequence: Synthetic peptide
VISRGGSTNYADSVKGRFT

SEQ ID NO: 534 - protein, 19 aa, synthetic construct
  REGION 1..19: note = Description of Artificial Sequence: Synthetic peptide
TIDQLGRTNYADSVKGRFA

SEQ ID NO: 535 - protein, 19 aa, synthetic construct
  REGION 1..19: note = Description of Artificial Sequence: Synthetic peptide
SISSSGDFTYTDSVKGRFT

SEQ ID NO: 536 - protein, 20 aa, synthetic construct
  REGION 1..20: note = Description of Artificial Sequence: Synthetic peptide
FVSKDGKRILYLDSVRGRFT

SEQ ID NO: 537 - protein, 20 aa, synthetic construct
  REGION 1..20: note = Description of Artificial Sequence: Synthetic peptide
FVSKDGKRILYLDSVRGRFT

SEQ ID NO: 538 - protein, 20 aa, synthetic construct
  REGION 1..20: note = Description of Artificial Sequence: Synthetic peptide
SISGSGSDTLYADSVKGRFT

SEQ ID NO: 539 - protein, 19 aa, synthetic construct
  REGION 1..19: note = Description of Artificial Sequence: Synthetic peptide
DISPVGNTNYADSVKGRFT

SEQ ID NO: 540 - protein, 19 aa, synthetic construct
  REGION 1..19: note = Description of Artificial Sequence: Synthetic peptide
SHTSTGYVYYRDSVKGRFT

SEQ ID NO: 541 - protein, 19 aa, synthetic construct
  REGION 1..19: note = Description of Artificial Sequence: Synthetic peptide
VITDRGSTSYADSVKGRFT

SEQ ID NO: 542 - protein, 20 aa, synthetic construct
  REGION 1..20: note = Description of Artificial Sequence: Synthetic peptide
AISRSGGTTRYSDSVKGRFT

SEQ ID NO: 543 - protein, 19 aa, synthetic construct
  REGION 1..19: note = Description of Artificial Sequence: Synthetic peptide
SINSSGSTNYGDSVKGRFT

SEQ ID NO: 544 - protein, 20 aa, synthetic construct
  REGION 1..20: note = Description of Artificial Sequence: Synthetic peptide
RISVREDKEDYEDSVKGRFT

SEQ ID NO: 545 - protein, 18 aa, synthetic construct
  REGION 1..18: note = Description of Artificial Sequence: Synthetic peptide
VISGSSTYYADSVKGRFT

SEQ ID NO: 546 - protein, 19 aa, synthetic construct
  REGION 1..19: note = Description of Artificial Sequence: Synthetic peptide
WINNSGVGNTAESVKGRFT

SEQ ID NO: 547 - protein, 20 aa, synthetic construct
  REGION 1..20: note = Description of Artificial Sequence: Synthetic peptide
VISSDGGSTRYAALVKGRFT

SEQ ID NO: 548 - protein, 19 aa, synthetic construct
  REGION 1..19: note = Description of Artificial Sequence: Synthetic peptide
FISSGGSTNVRDSVKGRFS

SEQ ID NO: 549 - protein, 19 aa, synthetic construct
  REGION 1..19: note = Description of Artificial Sequence: Synthetic peptide
TISNRGTSNYANSVKGRFT

SEQ ID NO: 550 - protein, 19 aa, synthetic construct
  REGION 1..19: note = Description of Artificial Sequence: Synthetic peptide
TITKGGTTDYADSVDGRFT

SEQ ID NO: 551 - protein, 19 aa, synthetic construct
  REGION 1..19: note = Description of Artificial Sequence: Synthetic peptide
VITDRGSTSYADSVKGRFT

SEQ ID NO: 552 - protein, 19 aa, synthetic construct
  REGION 1..19: note = Description of Artificial Sequence: Synthetic peptide
TINRGGSTNVRDSVKGRFS

SEQ ID NO: 553 - protein, 19 aa, synthetic construct
  REGION 1..19: note = Description of Artificial Sequence: Synthetic peptide
VITNRGTTSYADSVKGRFT

SEQ ID NO: 554 - protein, 18 aa, synthetic construct
  REGION 1..18: note = Description of Artificial Sequence: Synthetic peptide
VIYGSSTYYADAVKGRFT

SEQ ID NO: 555 - protein, 19 aa, synthetic construct
  REGION 1..19: note = Description of Artificial Sequence: Synthetic peptide
YVTSRGTSNVADSVKGRFT

SEQ ID NO: 556 - protein, 19 aa, synthetic construct
  REGION 1..19: note = Description of Artificial Sequence: Synthetic peptide
FISSGGSTNVRDSVKGRFS

SEQ ID NO: 557 - protein, 19 aa, synthetic construct
  REGION 1..19: note = Description of Artificial Sequence: Synthetic peptide
RISGRGVVDYVESVKGRFT

SEQ ID NO: 558 - protein, 19 aa, synthetic construct
  REGION 1..19: note = Description of Artificial Sequence: Synthetic peptide
RISGRGVVDYVESVKGRFT

SEQ ID NO: 559 - protein, 19 aa, synthetic construct
  REGION 1..19: note = Description of Artificial Sequence: Synthetic peptide
FISSGGSTNVRDSVKGRFT

SEQ ID NO: 560 - protein, 19 aa, synthetic construct
  REGION 1..19: note = Description of Artificial Sequence: Synthetic peptide
FISSGGSTNVRDSVKGRFT

SEQ ID NO: 561 - protein, 19 aa, synthetic construct
  REGION 1..19: note = Description of Artificial Sequence: Synthetic peptide
FISSGGSTNVRDSVKGRFT

SEQ ID NO: 562 - protein, 18 aa, synthetic construct
  REGION 1..18: note = Description of Artificial Sequence: Synthetic peptide
VIYGSSTYYADAVKGRFT

SEQ ID NO: 563 - protein, 18 aa, synthetic construct
  REGION 1..18: note = Description of Artificial Sequence: Synthetic peptide
VIYGSSTYYADAVKGRFT

SEQ ID NO: 564 - protein, 18 aa, synthetic construct
  REGION 1..18: note = Description of Artificial Sequence: Synthetic peptide
VIYGSSTYYADAVKGRFT

SEQ ID NO: 565 - protein, 19 aa, synthetic construct
  REGION 1..19: note = Description of Artificial Sequence: Synthetic peptide
YVTSRGTSNVADSVKGRFT

SEQ ID NO: 566 - protein, 19 aa, synthetic construct
  REGION 1..19: note = Description of Artificial Sequence: Synthetic peptide
YVTSRGTSNVADSVKGRFT

SEQ ID NO: 567 - protein, 19 aa, synthetic construct
  REGION 1..19: note = Description of Artificial Sequence: Synthetic peptide
YVTSRGTSNVADSVKGRFT

SEQ ID NO: 568 - skipped

SEQ ID NO: 569 - protein, 15 aa, synthetic construct
  REGION 1..15: note = Description of Artificial Sequence: Synthetic peptide
GRFKGDYAQRSGMDY

SEQ ID NO: 570 - protein, 8 aa, synthetic construct
  REGION 1..8: note = Description of Artificial Sequence: Synthetic peptide
QRSGVRAF

SEQ ID NO: 571 - protein, 15 aa, synthetic construct
  REGION 1..15: note = Description of Artificial Sequence: Synthetic peptide
DRVEGTSGGPQLRDY

SEQ ID NO: 572 - protein, 8 aa, synthetic construct
  REGION 1..8: note = Description of Artificial Sequence: Synthetic peptide
RTYTRHDY

SEQ ID NO: 573 - protein, 14 aa, synthetic construct
  REGION 1..14: note = Description of Artificial Sequence: Synthetic peptide
GGGPLGSRWLRGRH

SEQ ID NO: 574 - protein, 11 aa, synthetic construct
  REGION 1..11: note = Description of Artificial Sequence: Synthetic peptide
RRTYLPRRFGS

SEQ ID NO: 575 - protein, 8 aa, synthetic construct
  REGION 1..8: note = Description of Artificial Sequence: Synthetic peptide
APGAARNY

SEQ ID NO: 576 - protein, 8 aa, synthetic construct
  REGION 1..8: note = Description of Artificial Sequence: Synthetic peptide
APGAARNV

SEQ ID NO: 577 - protein, 8 aa, synthetic construct
  REGION 1..8: note = Description of Artificial Sequence: Synthetic peptide
GGSLSRSS

SEQ ID NO: 578 - protein, 16 aa, synthetic construct
  REGION 1..16: note = Description of Artificial Sequence: Synthetic peptide
VRGWLDERPGPGPIVY

SEQ ID NO: 579 - protein, 7 aa, synthetic construct
  REGION 1..7: note = Description of Artificial Sequence: Synthetic peptide
NRGSYEY

SEQ ID NO: 580 - protein, 7 aa, synthetic construct
  REGION 1..7: note = Description of Artificial Sequence: Synthetic peptide
IADWRGY

SEQ ID NO: 581 - protein, 11 aa, synthetic construct
  REGION 1..11: note = Description of Artificial Sequence: Synthetic peptide
RRRGWGRTLEY

SEQ ID NO: 582 - protein, 9 aa, synthetic construct
  REGION 1..9: note = Description of Artificial Sequence: Synthetic peptide
SDFRRGTQY

SEQ ID NO: 583 - protein, 10 aa, synthetic construct
  REGION 1..10: note = Description of Artificial Sequence: Synthetic peptide
QRWGRGPGTT

SEQ ID NO: 584 - protein, 9 aa, synthetic construct
  REGION 1..9: note = Description of Artificial Sequence: Synthetic peptide
DDSGIARDY

SEQ ID NO: 585 - protein, 10 aa, synthetic construct
  REGION 1..10: note = Description of Artificial Sequence: Synthetic peptide
YRRFGINKNY

SEQ ID NO: 586 - protein, 13 aa, synthetic construct
  REGION 1..13: note = Description of Artificial Sequence: Synthetic peptide
LRTYYLNDPVVFS

SEQ ID NO: 587 - protein, 11 aa, synthetic construct
  REGION 1..11: note = Description of Artificial Sequence: Synthetic peptide
YIPLRGTLHDY

SEQ ID NO: 588 - protein, 7 aa, synthetic construct
  REGION 1..7: note = Description of Artificial Sequence: Synthetic peptide
RKWGRNY

SEQ ID NO: 589 - protein, 11 aa, synthetic construct
  REGION 1..11: note = Description of Artificial Sequence: Synthetic peptide
KRREWAKDFEY

SEQ ID NO: 590 - protein, 7 aa, synthetic construct
  REGION 1..7: note = Description of Artificial Sequence: Synthetic peptide
IADWRGY

SEQ ID NO: 591 - protein, 11 aa, synthetic construct
  REGION 1..11: note = Description of Artificial Sequence: Synthetic peptide
YIPYGGTLHDF

SEQ ID NO: 592 - protein, 7 aa, synthetic construct
  REGION 1..7: note = Description of Artificial Sequence: Synthetic peptide
IADWRGY

SEQ ID NO: 593 - protein, 9 aa, synthetic construct
  REGION 1..9: note = Description of Artificial Sequence: Synthetic peptide
DTIGTARDY

SEQ ID NO: 594 - protein, 9 aa, synthetic construct
  REGION 1..9: note = Description of Artificial Sequence: Synthetic peptide
RTTSYPVDF

SEQ ID NO: 595 - protein, 11 aa, synthetic construct
  REGION 1..11: note = Description of Artificial Sequence: Synthetic peptide
YIPYGGTLHDF

SEQ ID NO: 596-597 - skipped (2 entries)

SEQ ID NO: 598 - protein, 11 aa, synthetic construct
  REGION 1..11: note = Description of Artificial Sequence: Synthetic peptide
YIPYGGTLHDF

SEQ ID NO: 599 - protein, 11 aa, synthetic construct
  REGION 1..11: note = Description of Artificial Sequence: Synthetic peptide
YIPYGGTLHDF

SEQ ID NO: 600 - protein, 11 aa, synthetic construct
  REGION 1..11: note = Description of Artificial Sequence: Synthetic peptide
YIPYGGTLHDF

SEQ ID NO: 601 - protein, 9 aa, synthetic construct
  REGION 1..9: note = Description of Artificial Sequence: Synthetic peptide
DTIGTARDY

SEQ ID NO: 602 - protein, 9 aa, synthetic construct
  REGION 1..9: note = Description of Artificial Sequence: Synthetic peptide
DTIGTARDY

SEQ ID NO: 603 - protein, 9 aa, synthetic construct
  REGION 1..9: note = Description of Artificial Sequence: Synthetic peptide
DTIGTARDY

SEQ ID NO: 604 - protein, 9 aa, synthetic construct
  REGION 1..9: note = Description of Artificial Sequence: Synthetic peptide
RTTSYPVDF

SEQ ID NO: 605 - protein, 9 aa, synthetic construct
  REGION 1..9: note = Description of Artificial Sequence: Synthetic peptide
RTTSYPVDF

SEQ ID NO: 606 - protein, 9 aa, synthetic construct
  REGION 1..9: note = Description of Artificial Sequence: Synthetic peptide
RTTSYPVDF

SEQ ID NO: 607 - protein, 110 aa, synthetic construct
  REGION 1..110: note = Description of Artificial Sequence: Synthetic polypeptide
QVQLVESGGGLVQPGGSLRLSCAASGRTFSVRGMAWYRQAGNNRALVATMNPDGFPNYADAVKGRFTISWDIAENTVYLQMNSLNSEDTTVYYCNSGPYWGQGTQVTVSS

SEQ ID NO: 608 - protein, 123 aa, synthetic construct
  REGION 1..123: note = Description of Artificial Sequence: Synthetic polypeptide
QVQLVESGGGLVQAGGSLRLSCAASGSIPSIEQMGWYRQAPGKQRELVAALTSGGRANYADSVKGRFTISGDNVRNMVYLQMNSLKPEDTAIYYCSAGRFKGDYAQRSGMDYWGKGTLVTVSS

SEQ ID NO: 609 - protein, 116 aa, synthetic construct
  REGION 1..116: note = Description of Artificial Sequence: Synthetic polypeptide
QVQLVESGGGLVQAGGSLRLSCAFSGTTYTFDLMSWYRQAPGKQRTVVASISSDGRTSYADSVRGRFTISGENGKNTVYLQMNSLKLEDTAVYYCLGQRSGVRAFWGQGTQVTVSS

SEQ ID NO: 610 - protein, 123 aa, synthetic construct
  REGION 1..123: note = Description of Artificial Sequence: Synthetic polypeptide
QVQLVESGGGLVQAGGSLRLSCVASGSTSNINNMRWYRQAPGKERELVAVITRGGYAIYLDAVKGRFTISRDNANNAIYLEMNSLKPEDTAVYVCNADRVEGTSGGPQLRDYFGQGTQVTVSS

SEQ ID NO: 611 - protein, 116 aa, synthetic construct
  REGION 1..116: note = Description of Artificial Sequence: Synthetic polypeptide
QVQLVESGGGLVQAGGSLRLSCAASGSTFGINAMGWYRQAPGKQRELVAVISRGGSTNYADSVKGRFTISRDNAENTVSLQMNTLKPEDTAVYFCNARTYTRHDYWGQGTQVTVSS

SEQ ID NO: 612 - protein, 122 aa, synthetic construct
  REGION 1..122: note = Description of Artificial Sequence: Synthetic polypeptide
QVRLVESGGGLVQAGGSLRLSCAASISAFRLMSVRWYRQDPSKQREWVATIDQLGRTNYADSVKGRFAISKDSTRNTVYLQMNMLRPEDTAVYYCNAGGGPLGSRWLRGRHWGQGTQVTVSS

SEQ ID NO: 613 - protein, 119 aa, synthetic construct
  REGION 1..119: note = Description of Artificial Sequence: Synthetic polypeptide
QVRLVESGGGLVQAGESLRLSCAASGRPFSINTMGWYRQAPGKQRELVASISSSGDFTYTDSVKGRFTISRDNAKNTVYLQMNSLKPEDTAVYYCNARRTYLPRRFGSWGQGTQVTVSS

SEQ ID NO: 614 - protein, 117 aa, synthetic construct
  REGION 1..117: note = Description of Artificial Sequence: Synthetic polypeptide
QVQPVESGGGLVQPGGSLRLSCVVSGSDFTEDAMAWYRQASGKERESVAFVSKDGKRILYLDSVRGRFTISRDIDKKTVYLQMDNLKPEDTGVYYCNSAPGAARNYWGQGTQVTVSS

SEQ ID NO: 615 - protein, 117 aa, synthetic construct
  REGION 1..117: note = Description of Artificial Sequence: Synthetic polypeptide
QVQPVESGGGLVQPGGSLRLSCVVSGSDFTEDAMAWYRQASGKERESVAFVSKDGKRILYLDSVRGRFTISRDIYKKTVYLQMDNLKPEDTGVYYCNSAPGAARNVWGQGTQVTVSS

SEQ ID NO: 616 - protein, 115 aa, synthetic construct [sequence omitted]

SEQ ID NO: 617 - protein, 124 aa, synthetic construct
  REGION 1..124: note = Description of Artificial Sequence: Synthetic polypeptide
QVQIVESGGGLVQAGGSLRLSCVASGLTYSIVAVGWYRQAPGKEREMVADISPVGNTNYADSVKGRFTISKENAKNTVYLQMNSLKPEDTAVYYCHIVRGWLDERPGPGPIVYWGQGTQVTVSS

SEQ ID NO: 618 - protein, 115 aa, synthetic construct
  REGION 1..115: note = Description of Artificial Sequence: Synthetic polypeptide
QVQLVESGGGLVQTGGSLRLSCAASGLTFGVYGMEWFRQAPGKQREWVASHTSTGYVYYRDSVKGRFTISRDNAKSTVYLQMNSLKPEDTAIYYCKANRGSYEYWGQGTQVTVSS

SEQ ID NO: 619 - protein, 114 aa, synthetic construct
  REGION 1..114: note = Description of Artificial Sequence: Synthetic polypeptide
QVQLVESGGGLVQAGGSLRLSCAASTTSSINSMSWYRQAQGKQREPVAVITDRGSTSYADSVKGRFTISRDNAKNTVYLQMNSLKPEDTAIYTCHVIADWRGYWGQGTQVTVSS

SEQ ID NO: 620 - protein, 120 aa, synthetic construct
  REGION 1..120: note = Description of Artificial Sequence: Synthetic polypeptide
QVQLVESGGGLVQAGGSLRLSCAASGRTLSRYAMGWFRQAPGKERQFVAAISRSGGTTRYSDSVKGRFTISRDNAANTFYLQMNNLRPDDTAVYYCNVRRRGWGRTLEYWGQGTQVTVSS

SEQ ID NO: 621 - protein, 117 aa, synthetic construct
  REGION 1..117: note = Description of Artificial Sequence: Synthetic polypeptide
QVQLGESGGGLVQAGGSLRLSCAASGSIFSPNAMIWHRQAPGKQREPVASINSSGSTNYGDSVKGRFTVSRDIVKNTMYLQMNSLKPEDTAVYYCSYSDFRRGTQYWGQGTQVTVSS

SEQ ID NO: 622 - protein, 119 aa, synthetic construct
  REGION 1..119: note = Description of Artificial Sequence: Synthetic polypeptide
QVQLVESGGGLVPSGGSLRLSCAASGATSAITNLGWYRRAPGQVREMVARISVREDKEDYEDSVKGRFTISRDNTQNLVYLQMNNLQPHDTAIYYCGAQRWGRGPGTTWGQGTQVTVSS

SEQ ID NO: 623 - protein, 116 aa, synthetic construct
  REGION 1..116: note = Description of Artificial Sequence: Synthetic polypeptide
QVQLVESGGGLVQAGGSLRLSCAASGSTFRIRVMRWYRQAPGTERDLVAVISGSSTYYADSVKGRFTISRDNAKNTLYLQMNNLKPEDTAVYYCNADDSGIARDYWGQGTQVTVSS

SEQ ID NO: 624 - protein, 118 aa, synthetic construct
  REGION 1..118: note = Description of Artificial Sequence: Synthetic polypeptide
QVQLVESGGGLVQAGESRRLSCAVSGDTSKFKAVGWYRQAPGAQRELLAWINNSGVGNTAESVKGRFTISRDNAKNTVYLQMNRLTPEDTDVYYCRFYRRFGINKNYWGQGTQVTVSS

SEQ ID NO: 625 - protein, 122 aa, synthetic construct
  REGION 1..122: note = Description of Artificial Sequence: Synthetic polypeptide
QVQLVESGGGLVQAGGSLRLSCAASGSTFGNKPMGWYRQAPGKQRELVAVISSDGGSTRYAALVKGRFTISRDNAKNTVYLQMESLVAEDTAVYYCNALRTYYLNDPVVFSWGQGTQVTVSS

SEQ ID NO: 626 - protein, 119 aa, synthetic construct
  REGION 1..119: note = Description of Artificial Sequence: Synthetic polypeptide
QVQLVESGGGLVQAGGSLRLSCAASGSTSSINTMYWYRQAPGKERELVAFISSGGSTNVRDSVKGRFSVSRDSAKNIVYLQMNSLTPEDTAVYYCNTYIPLRGTLHDYWGQGTQVTVSS

SEQ ID NO: 627 - protein, 115 aa, synthetic construct
  REGION 1..115: note = Description of Artificial Sequence: Synthetic polypeptide
QVQLVESGGGLVQAGGSLRLSCVASGRTDRITTMGWYRQAPGKQRELVATISNRGTSNYANSVKGRFTISRDNAKNTVYLQMNSLKPEDTAVYYCNARKWGRNYWGQGTQVTVSS

SEQ ID NO: 628 - protein, 119 aa, synthetic construct
  REGION 1..119: note = Description of Artificial Sequence: Synthetic polypeptide
QVQLVESGGGLVQARGSLRLSCTASGRTIGINDMAWYRQAPGNQRELVATITKGGTTDYADSVDGRFTISRDNAKNTVYLQMNSLKPEDTAVYYCNTKRREWAKDFEYWGQGTQVTVSS

SEQ ID NO: 629 - protein, 114 aa, synthetic construct
  REGION 1..114: note = Description of Artificial Sequence: Synthetic polypeptide
QVQLVESGGGLVQAGGSLRLSCAASAIGSINSMSWYRQAPGKQREPVAVITDRGSTSYADSVKGRFTISRDNAKNTVYLQMNSLKPEDTAIYTCHVIADWRGYWGQGTQVTVSS

SEQ ID NO: 630 - protein, 119 aa, synthetic construct
  REGION 1..119: note = Description of Artificial Sequence: Synthetic polypeptide
QVQLVESGGGLVQAGGSLRLSCAASGSTSSINTMYWFRQAPGEERELVATINRGGSTNVRDSVKGRFSVSRDSAKNIVYLQMNRLKPEDTAVYYCNTYIPYGGTLHDFWGQGTQVTVSS

SEQ ID NO: 631 - protein, 114 aa, synthetic construct
  REGION 1..114: note = Description of Artificial Sequence: Synthetic polypeptide
QVQLVESGGGLVQAGGSLRLSCTTSTTFSINSMSWYRQAPGNQREPVAVITNRGTTSYADSVKGRFTISRDNARNTVYLQMDSLKPEDTAIYTCHVIADWRGYWGQGTQVTVSS

SEQ ID NO: 632 - protein, 116 aa, synthetic construct
  REGION 1..116: note = Description of Artificial Sequence: Synthetic polypeptide
QVQLVESGGGLVQAGGSLTLSCAASGSTFSIRAMRWYRQAPGTERDLVAVIYGSSTYYADAVKGRFTISRDNAKNTLYLQMNNLKPEDTAVYYCNADTIGTARDYWGQGTQVTVSS

SEQ ID NO: 633 - protein, 117 aa, synthetic construct
  REGION 1..117: note = Description of Artificial Sequence: Synthetic polypeptide
QVQLVESGGGLVQAGGSLRLSCVASGRTSTIDTMYWHRQAPGNERELVAYVTSRGTSNVADSVKGRFTISRDNAKNTAYLQMNSLKPEDTAVYYCSVRTTSYPVDFWGQGTQVTVSS

SEQ ID NO: 634 - protein, 119 aa, synthetic construct
  REGION 1..119: note = Description of Artificial Sequence: Synthetic polypeptide
QVQLVESGGGLVQAGGSLRLSCAASGSTSSINTMYWYRQAPGKERELVAFISSGGSTNVRDSVKGRFSVSRDSAKNIVYLQMNSLKPEDTAVYYCNTYIPYGGTLHDFWGQGTQVTVSS

SEQ ID NO: 635 - protein, 111 aa, synthetic construct
  REGION 1..111: note = Description of Artificial Sequence: Synthetic polypeptide
QVQLVESGGGLVQPGGSLRLSCAASGGDWSANFMYWYRQAPGKQRELVARISGRGVVDYVESVKGRFTISRDNAKNTVYLQMNSLKPEDTAVYYCAVASYWGQGTQVTVSS

SEQ ID NO: 636 - protein, 111 aa, synthetic construct
  REGION 1..111: note = Description of Artificial Sequence: Synthetic polypeptide
EVQLVESGGGLVQPGGSLRLSCAASGGDWSANFMYWYRQAPGKQRELVARISGRGVVDYVESVKGRFTISRDNSKNTLYLQMNSLRAEDTAVYYCAVASYWGQGTLVTVSS

SEQ ID NO: 637 - protein, 111 aa, synthetic construct
  REGION 1..111: note = Description of Artificial Sequence: Synthetic polypeptide
EVQLVESGGGLVQPGGSLRLSCAASGGDWSANFMYWVRQAPGKGLEWVSRISGRGVVDYVESVKGRFTISRDNSKNTLYLQMNSLRAEDTAVYYCAVASYWGQGTLVTVSS

SEQ ID NO: 638 - protein, 119 aa, synthetic construct
  REGION 1..119: note = Description of Artificial Sequence: Synthetic polypeptide
EVQLVESGGGLVQAGGSLRLSCAASGSTSSINTMYWYRQAPGKERELVAFISSGGSTNVRDSVKGRFTISRDNSKNTLYLQMNSLRAEDTAVYYCNTYIPYGGTLHDFWGQGTLVTVSS

SEQ ID NO: 639 - protein, 119 aa, synthetic construct
  REGION 1..119: note = Description of Artificial Sequence: Synthetic polypeptide
EVQLVESGGGLVQPGGSLRLSCAASGSTSSINTMYWYRQAPGKERELVAFISSGGSTNVRDSVKGRFTISRDNSKNTLYLQMNSLRAEDTAVYYCNTYIPYGGTLHDFWGQGTLVTVSS

SEQ ID NO: 640 - protein, 119 aa, synthetic construct
  REGION 1..119: note = Description of Artificial Sequence: Synthetic polypeptide
EVQLVESGGGLVQPGGSLRLSCAASGSTSSINTMYWVRQAPGKGLEWVSFISSGGSTNVRDSVKGRFTISRDNSKNTLYLQMNSLRAEDTAVYYCNTYIPYGGTLHDFWGQGTLVTVSS

SEQ ID NO: 641 - protein, 118 aa, synthetic construct
  REGION 1..118: note = Description of Artificial Sequence: Synthetic polypeptide
QVQLVESGGGVVQAGGSLRLSCAASGSTFSIRAMRWYRQAPGTERDLVAVIYGSSTYYADAVKGRFTISRDNSKNTLYLQMNSLRAEDTAVYYCNADTIGTARDYWGQGTLVTVSSGG

SEQ ID NO: 642 - protein, 118 aa, synthetic construct
  REGION 1..118: note = Description of Artificial Sequence: Synthetic polypeptide
QVQLVESGGGVVQPGGSLRLSCAASGSTFSIRAMRWYRQAPGKERELVAVIYGSSTYYADAVKGRFTISRDNSKNTLYLQMNSLRAEDTAVYYCNADTIGTARDYWGQGTLVTVSSGG

SEQ ID NO: 643 - protein, 118 aa, synthetic construct
  REGION 1..118: note = Description of Artificial Sequence: Synthetic polypeptide
QVQLVESGGGVVQPGGSLRLSCAASGSTFSIRAMRWVRQAPGKGLEWVSVIYGSSTYYADAVKGRFTISRDNSKNTLYLQMNSLRAEDTAVYYCNADTIGTARDYWGQGTLVTVSSGG

SEQ ID NO: 644 - protein, 116 aa, synthetic construct
  REGION 1..116: note = Description of Artificial Sequence: Synthetic polypeptide
EVQLVESGGGLVQAGGSLRLSCVASGRTSTIDTMYWHRQAPGNERELVAYVTSRGTSNVADSVKGRFTISRDNSKNTLYLQMNSLRAEDTAVYYCSVRTTSYPVDFWGQGTLVTVS

SEQ ID NO: 645 - protein, 117 aa, synthetic construct
  REGION 1..117: note = Description of Artificial Sequence: Synthetic polypeptide
EVQLVESGGGLVQPGGSLRLSCAASGRTSTIDTMYWHRQAPGKERELVAYVTSRGTSNVADSVKGRFTISRDNSKNTLYLQMNSLRAEDTAVYYCSVRTTSYPVDFWGQGTLVTVSS

SEQ ID NO: 646 - protein, 117 aa, synthetic construct
  REGION 1..117: note = Description of Artificial Sequence: Synthetic polypeptide
EVQLVESGGGLVQPGGSLRLSCAASGRTSTIDTMYWVRQAPGKGLEWVSYVTSRGTSNVADSVKGRFTISRDNSKNTLYLQMNSLRAEDTAVYYCSVRTTSYPVDFWGQGTLVTVSS

SEQ ID NO: 647 - protein, 116 aa, synthetic construct
  REGION 1..116: note = Description of Artificial Sequence: Synthetic polypeptide
QVQLVESGGGVVQAGGSLTLSCAASGSTFSIRAMRWYRQAPGTERDLVAVIYGSSTYYADAVKGRFTISRDNSKNTLYLQMNSLRAEDTAVYYCNADTIGTARDYWGQGTLVTVSS

SEQ ID NO: 648 - protein, 116 aa, synthetic construct
  REGION 1..116: note = Description of Artificial Sequence: Synthetic polypeptide
QVQLVESGGGVVQAGGSLRLSCAASGSTFSIRAMRWYRQAPGTERDLVAVIYGSSTYYADAVKGRFTISRDNSKNTLYLQMNSLRAEDTAVYYCNADTIGTARDYWGQGTLVTVSS

SEQ ID NO: 649 - protein, 116 aa, synthetic construct
  REGION 1..116: note = Description of Artificial Sequence: Synthetic polypeptide
QVQLVESGGGVVQPGGSLRLSCAASGSTFSIRAMRWYRQAPGKERELVAVIYGSSTYYADAVKGRFTISRDNSKNTLYLQMNSLRAEDTAVYYCNADTIGTARDYWGQGTLVTVSS

SEQ ID NO: 650 - protein, 116 aa, synthetic construct
  REGION 1..116: note = Description of Artificial Sequence: Synthetic polypeptide
QVQLVESGGGVVQPGGSLRLSCAASGSTFSIRAMRWVRQAPGKGLEWVSVIYGSSTYYADAVKGRFTISRDNSKNTLYLQMNSLRAEDTAVYYCNADTIGTARDYWGQGTLVTVSS

SEQ ID NO: 651 - protein, 10 aa, synthetic construct
  REGION 1..10: note = Description of Artificial Sequence: Synthetic peptide
GSIAYIYTMD

SEQ ID NO: 652 - protein, 10 aa, synthetic construct
  REGION 1..10: note = Description of Artificial Sequence: Synthetic peptide
GRTDSWYVMG

SEQ ID NO: 653 - protein, 10 aa, synthetic construct
  REGION 1..10: note = Description of Artificial Sequence: Synthetic peptide
RTIISINAMT

SEQ ID NO: 654 - protein, 10 aa, synthetic construct
  REGION 1..10: note = Description of Artificial Sequence: Synthetic peptide
ARTLRLYAVG

SEQ ID NO: 655 - protein, 10 aa, synthetic construct
  REGION 1..10: note = Description of Artificial Sequence: Synthetic peptide
GSIAYIYTMD

SEQ ID NO: 656 - protein, 10 aa, synthetic construct
  REGION 1..10: note = Description of Artificial Sequence: Synthetic peptide
GSIAYIYTMD

SEQ ID NO: 657 - protein, 6 aa, synthetic construct
  REGION 1..6: note = Description of Artificial Sequence: Synthetic peptide
GRYQMA

SEQ ID NO: 658 - protein, 10 aa, synthetic construct
  REGION 1..10: note = Description of Artificial Sequence: Synthetic peptide
TRTLKLYAVG

SEQ ID NO: 659 - protein, 10 aa, synthetic construct
  REGION 1..10: note = Description of Artificial Sequence: Synthetic peptide
GSIAYIYTMD

SEQ ID NO: 660 - protein, 10 aa, synthetic construct
  REGION 1..10: note = Description of Artificial Sequence: Synthetic peptide
GSIAYIYTMD

SEQ ID NO: 661 - protein, 10 aa, synthetic construct
  REGION 1..10: note = Description of Artificial Sequence: Synthetic peptide
GSIAYIYTMD

SEQ ID NO: 662 - protein, 6 aa, synthetic construct
  REGION 1..6: note = Description of Artificial Sequence: Synthetic peptide
GRYQMA

SEQ ID NO: 663 - protein, 10 aa, synthetic construct
  REGION 1..10: note = Description of Artificial Sequence: Synthetic peptide
GSIVTINAMT

SEQ ID NO: 664 - protein, 10 aa, synthetic construct
  REGION 1..10: note = Description of Artificial Sequence: Synthetic peptide
RSIVSIKSMT

SEQ ID NO: 665 - protein, 10 aa, synthetic construct
  REGION 1..10: note = Description of Artificial Sequence: Synthetic peptide
GSTFRHHAMA

SEQ ID NO: 666 - protein, 10 aa, synthetic construct
  REGION 1..10: note = Description of Artificial Sequence: Synthetic peptide
GSIAYIYTMD

SEQ ID NO: 667 - protein, 10 aa, synthetic construct
  REGION 1..10: note = Description of Artificial Sequence: Synthetic peptide
GSIAYIYTMD

SEQ ID NO: 668 - protein, 10 aa, synthetic construct
  REGION 1..10: note = Description of Artificial Sequence: Synthetic peptide
VSIFSVNAVD

SEQ ID NO: 669 - protein, 10 aa, synthetic construct
  REGION 1..10: note = Description of Artificial Sequence: Synthetic peptide
GSIAYIYTMD

SEQ ID NO: 670 - protein, 6 aa, synthetic construct
  REGION 1..6: note = Description of Artificial Sequence: Synthetic peptide
GRYQLA

SEQ ID NO: 671 - protein, 6 aa, synthetic construct
  REGION 1..6: note = Description of Artificial Sequence: Synthetic peptide
GRYHMA

SEQ ID NO: 672 - protein, 10 aa, synthetic construct
  REGION 1..10: note = Description of Artificial Sequence: Synthetic peptide
GSIAYIYTMD

SEQ ID NO: 673 - protein, 10 aa, synthetic construct
  REGION 1..10: note = Description of Artificial Sequence: Synthetic peptide
GSIAYIYTMD

SEQ ID NO: 674 - protein, 6 aa, synthetic construct
  REGION 1..6: note = Description of Artificial Sequence: Synthetic peptide
GRYNMA

SEQ ID NO: 675 - protein, 6 aa, synthetic construct
  REGION 1..6: note = Description of Artificial Sequence: Synthetic peptide
GRYQMA

SEQ ID NO: 676 - protein, 6 aa, synthetic construct
  REGION 1..6: note = Description of Artificial Sequence: Synthetic peptide
GRYHLA

SEQ ID NO: 677 - protein, 10 aa, synthetic construct
  REGION 1..10: note = Description of Artificial Sequence: Synthetic peptide
GRSFSNYIMG

SEQ ID NO: 678 - protein, 10 aa, synthetic construct
  REGION 1..10: note = Description of Artificial Sequence: Synthetic peptide
GSIAYIYTMD

SEQ ID NO: 679 - protein, 6 aa, synthetic construct
  REGION 1..6: note = Description of Artificial Sequence: Synthetic peptide
GRYQMA

SEQ ID NO: 680 - protein, 10 aa, synthetic construct
  REGION 1..10: note = Description of Artificial Sequence: Synthetic peptide
GLTFSSYAMA

SEQ ID NO: 681 - protein, 10 aa, synthetic construct
  REGION 1..10: note = Description of Artificial Sequence: Synthetic peptide
GNIAYIYTMD

SEQ ID NO: 682 - protein, 10 aa, synthetic construct
  REGION 1..10: note = Description of Artificial Sequence: Synthetic peptide
GSIAYIYTMD

SEQ ID NO: 683 - protein, 10 aa, synthetic construct
  REGION 1..10: note = Description of Artificial Sequence: Synthetic peptide
GSIAYIYTMD

SEQ ID NO: 684 - protein, 10 aa, synthetic construct
  REGION 1..10: note = Description of Artificial Sequence: Synthetic peptide
GNDFVITDMH

SEQ ID NO: 685 - protein, 10 aa, synthetic construct
  REGION 1..10: note = Description of Artificial Sequence: Synthetic peptide
GAIAYIYGMG

SEQ ID NO: 686 - protein, 6 aa, synthetic construct
  REGION 1..6: note = Description of Artificial Sequence: Synthetic peptide
GRYHTA

SEQ ID NO: 687 - protein, 10 aa, synthetic construct
  REGION 1..10: note = Description of Artificial Sequence: Synthetic peptide
GNIAYIYTMN

SEQ ID NO: 688 - protein, 10 aa, synthetic construct
  REGION 1..10: note = Description of Artificial Sequence: Synthetic peptide
GNIAYIYTMG

SEQ ID NO: 689 - protein, 10 aa, synthetic construct
  REGION 1..10: note = Description of Artificial Sequence: Synthetic peptide
GSIAYIYTMD

SEQ ID NO: 690 - protein, 10 aa, synthetic construct
  REGION 1..10: note = Description of Artificial Sequence: Synthetic peptide
GRTDSWYVMG

SEQ ID NO: 691 - protein, 10 aa, synthetic construct
  REGION 1..10: note = Description of Artificial Sequence: Synthetic peptide
ARTLRLYAVG

SEQ ID NO: 692 - protein, 10 aa, synthetic construct
  REGION 1..10: note = Description of Artificial Sequence: Synthetic peptide
GSIVTINAMT

SEQ ID NO: 693 - protein, 6 aa, synthetic construct
  REGION 1..6: note = Description of Artificial Sequence: Synthetic peptide
GRYHMA

SEQ ID NO: 694 - protein, 10 aa, synthetic construct
  REGION 1..10: note = Description of Artificial Sequence: Synthetic peptide
GSTFRHHAMA

SEQ ID NO: 695 - protein, 10 aa, synthetic construct
  REGION 1..10: note = Description of Artificial Sequence: Synthetic peptide
GRSFSNYIMG

SEQ ID NO: 696 - protein, 10 aa, synthetic construct
  REGION 1..10: note = Description of Artificial Sequence: Synthetic peptide
GLTFSSYAMA

SEQ ID NO: 697 - protein, 10 aa, synthetic construct
  REGION 1..10: note = Description of Artificial Sequence: Synthetic peptide
VSIFSVNAVD

SEQ ID NO: 698 - protein, 10 aa, synthetic construct
  REGION 1..10: note = Description of Artificial Sequence: Synthetic peptide
GNDFVITDMH

SEQ ID NO: 699 - protein, 10 aa, synthetic construct
  REGION 1..10: note = Description of Artificial Sequence: Synthetic peptide
GAIAYIYGMG

SEQ ID NO: 700 - protein, 16 aa, synthetic construct
  REGION 1..16: note = Description of Artificial Sequence: Synthetic peptide
TSTRDGNVDYAESVKG

SEQ ID NO: 701 - protein, 16 aa, synthetic construct
  REGION 1..16: note = Description of Artificial Sequence: Synthetic peptide
VSWSYGNTYYADSVKG

SEQ ID NO: 702 - protein, 16 aa, synthetic construct
  REGION 1..16: note = Description of Artificial Sequence: Synthetic peptide
IITSGGETNYADSVKG

SEQ ID NO: 703 - protein, 16 aa, synthetic construct
  REGION 1..16: note = Description of Artificial Sequence: Synthetic peptide
GIGRSERTYYTDSVKG

SEQ ID NO: 704 - protein, 16 aa, synthetic construct
  REGION 1..16: note = Description of Artificial Sequence: Synthetic peptide
TSTHDGNTDYADSVKG

SEQ ID NO: 705 - protein, 16 aa, synthetic construct
  REGION 1..16: note = Description of Artificial Sequence: Synthetic peptide
TSTRDGNTDYADSVKG

SEQ ID NO: 706 - protein, 16 aa, synthetic construct
  REGION 1..16: note = Description of Artificial Sequence: Synthetic peptide
TISSGDSTWYTNSVKG

SEQ ID NO: 707 - protein, 16 aa, synthetic construct
  REGION 1..16: note = Description of Artificial Sequence: Synthetic peptide
GIGRSERIYYIDSVKG

SEQ ID NO: 708 - protein, 16 aa, synthetic construct
  REGION 1..16: note = Description of Artificial Sequence: Synthetic peptide
TSTHDGNTDYADSVKG

SEQ ID NO: 709 - protein, 16 aa, synthetic construct
  REGION 1..16: note = Description of Artificial Sequence: Synthetic peptide
TFTRDGNTDYADSVKG

SEQ ID NO: 710 - protein, 16 aa, synthetic construct
  REGION 1..16: note = Description of Artificial Sequence: Synthetic peptide
TSTHDGNTDYADSLKG

SEQ ID NO: 711 - protein, 16 aa, synthetic construct
  REGION 1..16: note = Description of Artificial Sequence: Synthetic peptide
TISSGDSTWYTNSLKG

SEQ ID NO: 712 - protein, 16 aa, synthetic construct
  REGION 1..16: note = Description of Artificial Sequence: Synthetic peptide
IITSGGETNYADSVKG

SEQ ID NO: 713 - protein, 16 aa, synthetic construct
  REGION 1..16: note = Description of Artificial Sequence: Synthetic peptide
LITSGGETNYSDSVKG

SEQ ID NO: 714 - protein, 17 aa, synthetic construct
  REGION 1..17: note = Description of Artificial Sequence: Synthetic peptide
AINDHGDRTKYLDSVRG

SEQ ID NO: 715 - protein, 16 aa, synthetic construct
  REGION 1..16: note = Description of Artificial Sequence: Synthetic peptide
TSTHDGNTDYADSVKG

SEQ ID NO: 716 - protein, 16 aa, synthetic construct
  REGION 1..16: note = Description of Artificial Sequence: Synthetic peptide
TSTHDGNTDYADSVKG

SEQ ID NO: 717 - protein, 16 aa, synthetic construct
  REGION 1..16: note = Description of Artificial Sequence: Synthetic peptide
IMTSDGSTNYGDSVKG

SEQ ID NO: 718 - protein, 16 aa, synthetic construct
  REGION 1..16: note = Description of Artificial Sequence: Synthetic peptide
TSTRDGNIDYADSVKG

SEQ ID NO: 719 - protein, 16 aa, synthetic construct
  REGION 1..16: note = Description of Artificial Sequence: Synthetic peptide
TISSGDSTWYTNSVKG

SEQ ID NO: 720 - protein, 16 aa, synthetic construct
  REGION 1..16: note = Description of Artificial Sequence: Synthetic peptide
TISSGDSTWYTNSVKG

SEQ ID NO: 721 - protein, 16 aa, synthetic construct
  REGION 1..16: note = Description of Artificial Sequence: Synthetic peptide
TSTHDGNTDYTDSVKG

SEQ ID NO: 722 - protein, 16 aa, synthetic construct
  REGION 1..16: note = Description of Artificial Sequence: Synthetic peptide
TSTRDANTDYAGSVKG

SEQ ID NO: 723 - protein, 16 aa, synthetic construct
  REGION 1..16: note = Description of Artificial Sequence: Synthetic peptide
TITSADSTWYTNSVKG

SEQ ID NO: 724 - protein, 16 aa, synthetic construct
  REGION 1..16: note = Description of Artificial Sequence: Synthetic peptide
TISSGDSTWYTNSVKG

SEQ ID NO: 725 - protein, 16 aa, synthetic construct
  REGION 1..16: note = Description of Artificial Sequence: Synthetic peptide
TITSADSTWYTNSVKG

SEQ ID NO: 726 - protein, 17 aa, synthetic construct
  REGION 1..17: note = Description of Artificial Sequence: Synthetic peptide
GLGWSPGNTYYADSVKG

SEQ ID NO: 727 - protein, 16 aa, synthetic construct
  REGION 1..16: note = Description of Artificial Sequence: Synthetic peptide
TSTHDGNTDYADSVKG

SEQ ID NO: 728 - protein, 16 aa, synthetic construct
  REGION 1..16: note = Description of Artificial Sequence: Synthetic peptide
TISSGDSTWYTNSVKG

SEQ ID NO: 729 - protein, 16 aa, synthetic construct
  REGION 1..16: note = Description of Artificial Sequence: Synthetic peptide
RITSGGTTDYADSVKG

SEQ ID NO: 730 - protein, 16 aa, synthetic construct
  REGION 1..16: note = Description of Artificial Sequence: Synthetic peptide
TSTHDGSTDYADSVKG

SEQ ID NO: 731 - protein, 16 aa, synthetic construct
  REGION 1..16: note = Description of Artificial Sequence: Synthetic peptide
TSTWDGNTDYADSVKG

SEQ ID NO: 732 - protein, 16 aa, synthetic construct
  REGION 1..16: note = Description of Artificial Sequence: Synthetic peptide
TSTHDGNTDYADSVKG

SEQ ID NO: 733 - protein, 16 aa, synthetic construct
  REGION 1..16: note = Description of Artificial Sequence: Synthetic peptide
TITRFATTNYADSVKG

SEQ ID NO: 734 - protein, 16 aa, synthetic construct
  REGION 1..16: note = Description of Artificial Sequence: Synthetic peptide
AISSGGSTDYADSVKG

SEQ ID NO: 735 - protein, 16 aa, synthetic construct
  REGION 1..16: note = Description of Artificial Sequence: Synthetic peptide
TISSGDSTWYTNSVKG

SEQ ID NO: 736 - protein, 16 aa, synthetic construct
  REGION 1..16: note = Description of Artificial Sequence: Synthetic peptide
TSTHAGNTDYADSVKG

SEQ ID NO: 737 - protein, 16 aa, synthetic construct
  REGION 1..16: note = Description of Artificial Sequence: Synthetic peptide
TSTHDGNSDYADSVKG

SEQ ID NO: 738 - protein, 16 aa, synthetic construct
  REGION 1..16: note = Description of Artificial Sequence: Synthetic peptide
TSTRDGNVDYADSVKG

SEQ ID NO: 739 - protein, 17 aa, synthetic construct
  REGION 1..17: note = Description of Artificial Sequence: Synthetic peptide
GVSWSYGNTYYADSVKG

SEQ ID NO: 740 - protein, 16 aa, synthetic construct
  REGION 1..16: note = Description of Artificial Sequence: Synthetic peptide
GIGRSERTYYTDSVKG

SEQ ID NO: 741 - protein, 16 aa, synthetic construct
  REGION 1..16: note = Description of Artificial Sequence: Synthetic peptide
IITSGGETNYADSVKG

SEQ ID NO: 742 - protein, 16 aa, synthetic construct
  REGION 1..16: note = Description of Artificial Sequence: Synthetic peptide
TISSGDSTWYTNSVKG

SEQ ID NO: 743 - protein, 17 aa, synthetic construct
  REGION 1..17: note = Description of Artificial Sequence: Synthetic peptide
AINDHGDRTKYLDSVKG

SEQ ID NO: 744 - protein, 17 aa, synthetic construct
  REGION 1..17: note = Description of Artificial Sequence: Synthetic peptide
GLGWSPGNTYYADSVKG

SEQ ID NO: 745 - protein, 16 aa, synthetic construct
  REGION 1..16: note = Description of Artificial Sequence: Synthetic peptide
RITSGGTTDYADSVKG

SEQ ID NO: 746 - protein, 16 aa, synthetic construct
  REGION 1..16: note = Description of Artificial Sequence: Synthetic peptide
IMTSDGSTNYDDSVKG

SEQ ID NO: 747 - protein, 16 aa, synthetic construct
  REGION 1..16: note = Description of Artificial Sequence: Synthetic peptide
TITRFATTNYADSVKG

SEQ ID NO: 748 - protein, 16 aa, synthetic construct
  REGION 1..16: note = Description of Artificial Sequence: Synthetic peptide
AISSGGSTDYADSVKG

SEQ ID NO: 749 - protein, 13 aa, synthetic construct
  REGION 1..13: note = Description of Artificial Sequence: Synthetic peptide
DLRTAVDLIRANY

SEQ ID NO: 750 - protein, 16 aa, synthetic construct
  REGION 1..16: note = Description of Artificial Sequence: Synthetic peptide
RVSREVIPTRWDLYNY

SEQ ID NO: 751 - protein, 6 aa, synthetic construct
  REGION 1..6: note = Description of Artificial Sequence: Synthetic peptide
VPPLGS

SEQ ID NO: 752 - protein, 19 aa, synthetic construct
  REGION 1..19: note = Description of Artificial Sequence: Synthetic peptide
TFQTTDMVDVPTTQHEYDY

SEQ ID NO: 753 - protein, 13 aa, synthetic construct
  REGION 1..13: note = Description of Artificial Sequence: Synthetic peptide
DLRTAVDLIRANY

SEQ ID NO: 754 - protein, 13 aa, synthetic construct
  REGION 1..13: note = Description of Artificial Sequence: Synthetic peptide
DLRTAVDLIRANY

SEQ ID NO: 755 - protein, 15 aa, synthetic construct
  REGION 1..15: note = Description of Artificial Sequence: Synthetic peptide
ALYYRDSRRAADYPY

SEQ ID NO: 756 - protein, 19 aa, synthetic construct
  REGION 1..19: note = Description of Artificial Sequence: Synthetic peptide
TFQTSDNVGVPTVQHEYDY

SEQ ID NO: 757 - protein, 13 aa, synthetic construct
  REGION 1..13: note = Description of Artificial Sequence: Synthetic peptide
DLRTAVDLIRANY

SEQ ID NO: 758 - protein, 13 aa, synthetic construct
  REGION 1..13: note = Description of Artificial Sequence: Synthetic peptide
DLRTAVDLIRANY

SEQ ID NO: 759 - protein, 13 aa, synthetic construct
  REGION 1..13: note = Description of Artificial Sequence: Synthetic peptide
DLRTAVDLIRANY

SEQ ID NO: 760 - protein, 15 aa, synthetic construct
  REGION 1..15: note = Description of Artificial Sequence: Synthetic peptide
ALYYRDSRRAADYPY

SEQ ID NO: 761 - protein, 6 aa, synthetic construct
  REGION 1..6: note = Description of Artificial Sequence: Synthetic peptide
VPPLGS

SEQ ID NO: 762 - protein, 6 aa, synthetic construct
  REGION 1..6: note = Description of Artificial Sequence: Synthetic peptide
VPPLGS

SEQ ID NO: 763 - protein, 16 aa, synthetic construct
  REGION 1..16: note = Description of Artificial Sequence: Synthetic peptide
GPLVDYLETTPLVYTY

SEQ ID NO: 764 - protein, 13 aa, synthetic construct
  REGION 1..13: note = Description of Artificial Sequence: Synthetic peptide
DLRTAVDLIRANY

SEQ ID NO: 765 - protein, 13 aa, synthetic construct
  REGION 1..13: note = Description of Artificial Sequence: Synthetic peptide
DLRTAVDLIRANY

SEQ ID NO: 766 - protein, 5 aa, synthetic construct
  REGION 1..5: note = Description of Artificial Sequence: Synthetic peptide
VPPRY

SEQ ID NO: 767 - protein, 13 aa, synthetic construct
  REGION 1..13: note = Description of Artificial Sequence: Synthetic peptide
DLRTAVDLIRANY

SEQ ID NO: 768 - protein, 15 aa, synthetic construct
  REGION 1..15: note = Description of Artificial Sequence: Synthetic peptide
ALYYRDSRRAADYPY

SEQ ID NO: 769 - protein, 15 aa, synthetic construct
  REGION 1..15: note = Description of Artificial Sequence: Synthetic peptide
ALYYGDSRRAADYPY

SEQ ID NO: 770 - protein, 13 aa, synthetic construct
  REGION 1..13: note = Description of Artificial Sequence: Synthetic peptide
DLRTAVDLIRANY

SEQ ID NO: 771 - protein, 13 aa, synthetic construct
  REGION 1..13: note = Description of Artificial Sequence: Synthetic peptide
DLRTAVDLIRANY

SEQ ID NO: 772 - protein, 15 aa, synthetic construct
  REGION 1..15: note = Description of Artificial Sequence: Synthetic peptide
ALYYGDSRRAADYPY

SEQ ID NO: 773 - protein, 15 aa, synthetic construct
  REGION 1..15: note = Description of Artificial Sequence: Synthetic peptide
ALYYRDSWRAADYPY

SEQ ID NO: 774 - protein, 15 aa, synthetic construct
  REGION 1..15: note = Description of Artificial Sequence: Synthetic peptide
ALYYGDSRRAADYPY

SEQ ID NO: 775 - protein, 15 aa, synthetic construct
  REGION 1..15: note = Description of Artificial Sequence: Synthetic peptide
RRGDVIYTTPWNYVY

SEQ ID NO: 776 - protein, 13 aa, synthetic construct
  REGION 1..13: note = Description of Artificial Sequence: Synthetic peptide
DLRTPVDLIRANY

SEQ ID NO: 777 - protein, 15 aa, synthetic construct
  REGION 1..15: note = Description of Artificial Sequence: Synthetic peptide
ALYYRDSRRAIDYPY

SEQ ID NO: 778 - protein, 14 aa, synthetic construct
  REGION 1..14: note = Description of Artificial Sequence: Synthetic peptide
DLTYRNLLLKLPHY

SEQ ID NO: 779 - protein, 13 aa, synthetic construct
  REGION 1..13: note = Description of Artificial Sequence: Synthetic peptide
DLRTPVDLIRANY

SEQ ID NO: 780 - protein, 13 aa, synthetic construct
  REGION 1..13: note = Description of Artificial Sequence: Synthetic peptide
DLRTAVDLIRANY

SEQ ID NO: 781 - protein, 13 aa, synthetic construct
  REGION 1..13: note = Description of Artificial Sequence: Synthetic peptide
DLRTAVDLIRANY

SEQ ID NO: 782 - protein, 15 aa, synthetic construct
  REGION 1..15: note = Description of Artificial Sequence: Synthetic peptide
IGLRGVPDVNRQFEV

SEQ ID NO: 783 - protein, 13 aa, synthetic construct
  REGION 1..13: note = Description of Artificial Sequence: Synthetic peptide
DVRTSRNLVRSDY

SEQ ID NO: 784 - protein, 15 aa, synthetic construct
  REGION 1..15: note = Description of Artificial Sequence: Synthetic peptide
ALYYGDSRRAGDYPY

SEQ ID NO: 785 - protein, 13 aa, synthetic construct
  REGION 1..13: note = Description of Artificial Sequence: Synthetic peptide
DLRTAVDLIRANY

SEQ ID NO: 786 - protein, 13 aa, synthetic construct
  REGION 1..13: note = Description of Artificial Sequence: Synthetic peptide
DLRTPVDRIRGNF

SEQ ID NO: 787 - protein, 13 aa, synthetic construct
  REGION 1..13: note = Description of Artificial Sequence: Synthetic peptide
DLRTAVDLIRANY

SEQ ID NO: 788 - protein, 16 aa, synthetic construct
  REGION 1..16: note = Description of Artificial Sequence: Synthetic peptide
RVSREVIPTRWDLYNY

SEQ ID NO: 789 - protein, 19 aa, synthetic construct
  REGION 1..19: note = Description of Artificial Sequence: Synthetic peptide
TFQTTDMVDVPTTQHEYDY

SEQ ID NO: 790 - protein, 6 aa, synthetic construct
  REGION 1..6: note = Description of Artificial Sequence: Synthetic peptide
VPPLGS

SEQ ID NO: 791 - protein, 15 aa, synthetic construct
  REGION 1..15: note = Description of Artificial Sequence: Synthetic peptide
ALYYGDSRRAADYPY

SEQ ID NO: 792 - protein, 16 aa, synthetic construct
  REGION 1..16: note = Description of Artificial Sequence: Synthetic peptide
GPLVDYLETTPLVYTY

SEQ ID NO: 793 - protein, 15 aa, synthetic construct
  REGION 1..15: note = Description of Artificial Sequence: Synthetic peptide
RRGDVIYTTPWNYVY

SEQ ID NO: 794 - protein, 14 aa, synthetic construct
  REGION 1..14: note = Description of Artificial Sequence: Synthetic peptide
DLTYRNLLLKLPHY

SEQ ID NO: 795 - protein, 5 aa, synthetic construct
  REGION 1..5: note = Description of Artificial Sequence: Synthetic peptide
VPPRY

SEQ ID NO: 796 - protein, 15 aa, synthetic construct
  REGION 1..15: note = Description of Artificial Sequence: Synthetic peptide
IGLRGVPDVNRQFEV

SEQ ID NO: 797 - protein, 13 aa, synthetic construct
  REGION 1..13: note = Description of Artificial Sequence: Synthetic peptide
DVRTSRNLVRSDY

SEQ ID NO: 798 - protein, 121 aa, synthetic construct
  REGION 1..121: note = Description of Artificial Sequence: Synthetic polypeptide
QVQLQESGGGLVQAGGSLRLSCAASGSIAYIYTMDWYRQAPGKQRELVATSTRDGNVDYAESVKGRFTISRDNAKNTVYLQMNSLKPEDTAVYYCNADLRTAVDLIRANYWGQGTQVTVSS

SEQ ID NO: 799 - protein, 125 aa, synthetic construct
  REGION 1..125: note = Description of Artificial Sequence: Synthetic polypeptide
QVQLQESGGGLVQAGDSLRLSCVVSGRTDSWYVMGWFRQAPGKDREFVAGVSWSYGNTYYADSVKGRFTASRDNAKNTAYLQMNSLNAEDTAVYYCAARVSREVIPTRWDLYNYWGQGTQVTVSS

SEQ ID NO: 800 - protein, 114 aa, synthetic construct
  REGION 1..114: note = Description of Artificial Sequence: Synthetic polypeptide
QVQLQESGGGSVQPGGSLRVSCVVSRTIISINAMTWYHQAPGKRRELVAIITSGGETNYADSVKGRFTISRDNAKNTAYLQMNNLKPEDTGVYYCNVVPPLGSWGQGTQVTVSS

SEQ ID NO: 801 - protein, 127 aa, synthetic construct
  REGION 1..127: note = Description of Artificial Sequence: Synthetic polypeptide
QVQLQESGGGRVQAGGSLRLSCSASARTLRLYAVGWFRQAPGKEREFVAGIGRSERTYYTDSVKGRFTLSRDNAKNTVFLEMNDLEPEDTAVYFCALTFQTTDMVDVPTTQHEYDYWGRGTQVTVSS

SEQ ID NO: 802 - protein, 121 aa, synthetic construct
  REGION 1..121: note = Description of Artificial Sequence: Synthetic polypeptide
QVQLQESGGGLVQAGGSLRLSCAASGSIAYIYTMDWYRQAPGKQRELVATSTHDGNTDYADSVKGRFTISRDNVKNTVYLQMNSLKPEDTAVYYCNADLRTAVDLIRANYWGQGTQVTVSS

SEQ ID NO: 803 - protein, 121 aa, synthetic construct
  REGION 1..121: note = Description of Artificial Sequence: Synthetic polypeptide
QVQLQESGGGLVQPGGSLRLSCAASGSIAYIYTMDWYRQAPGKQRELVATSTRDGNTDYADSVKGRFTISRDNAKDTVYLQMNSLKPEDTAVYYCNADLRTAVDLIRANYWGQGTQVTVSS

SEQ ID NO: 804 - protein, 119 aa, synthetic construct
  REGION 1..119: note = Description of Artificial Sequence: Synthetic polypeptide
QVQLQESGGGLVQAGGSLTLSCAASGRYQMAWFRQAPEKEREFVGTISSGDSTWYTNSVKGRFAISRDSARNTVYLQMNDLKPEDTAIYYCAAALYYRDSRRAADYPYWGQGTQVTVSS

SEQ ID NO: 805 - protein, 127 aa, synthetic construct
  REGION 1..127: note = Description of Artificial Sequence: Synthetic polypeptide
QVQLQESGGGRVQAGESLRLSCSTSTRTLKLYAVGWFRQAPGKERDFVAGIGRSERIYYIDSVKGRFTLSRDNAKNTVFLEMNDLEPEDTAVYFCAATFQTSDNVGVPTVQHEYDYWGQGTQVTVSS

SEQ ID NO: 806 - protein, 121 aa, synthetic construct
  REGION 1..121: note = Description of Artificial Sequence: Synthetic polypeptide
QVQLQESGGGLVQAGGSLRLSCAASGSIAYIYTMDWYRQAPGKQRELVATSTHDGNTDYADSVKGRFTISRDNAKNTVTLQMNSLKPEDTAVYYCNADLRTAVDLIRANYWGQGTQVTVSS

SEQ ID NO: 807 - protein, 121 aa, synthetic construct
  REGION 1..121: note = Description of Artificial Sequence: Synthetic polypeptide
QVQLQESGGGLVQAGGSLRLSCAASGSIAYIYTMDWYRQAPGKQRELVATFTRDGNTDYADSVKGRFTISRDNAKNTVYLQMNSLKPEDTAVYYCNTDLRTAVDLIRANYWGQGTQVTVSS

SEQ ID NO: 808 - protein, 121 aa, synthetic construct
  REGION 1..121: note = Description of Artificial Sequence: Synthetic polypeptide
QVQLQESGGGLVQAGGSLRLSCAASGSIAYIYTMDWYRQAPGKQRELVATSTHDGNTDYADSLKGRFTISRDNAKNTVYLQMNSLKPEDTAVYYCNADLRTAVDLIRANYWGQGTQVTVSS

SEQ ID NO: 809 - protein, 119 aa, synthetic construct
  REGION 1..119: note = Description of Artificial Sequence: Synthetic polypeptide
QVQLQESGGGSVQAGGSLRLSCAASGRYQMAWFRQAPEKEREFVGTISSGDSTWYTNSLKGRFAISRDSARDTVYLQMNDLKPEDTAVYYCAAALYYRDSRRAADYPYWGQGTQVTVSS

SEQ ID NO: 810 - protein, 114 aa, synthetic construct
  REGION 1..114: note = Description of Artificial Sequence: Synthetic polypeptide
QVQLQESGGGLVQTGGSLRLSCAVSGSIVTINAMTWYRQAPGKRRELVAIITSGGETNYADSVKGRFTISRDNAKNTAHLQMNSLNPEDTGVYYCNVVPPLGSWGQGTQVTVSS

SEQ ID NO: 811 - protein, 114 aa, synthetic construct
  REGION 1..114: note = Description of Artificial Sequence: Synthetic polypeptide
QVQLQESGGGLVQTGGSLRLSCAVSRSIVSIKSMTWYRQAPGKRRELVALITSGGETNYSDSVKGRFTISRDNAKNTVYLQMNSLKPEDTGVYYCNVVPPLGSWGQGTQVTVSS

SEQ ID NO: 812 - protein, 125 aa, synthetic construct
  REGION 1..125: note = Description of Artificial Sequence: Synthetic polypeptide
QVQLQESGGGLVETGGSLRLSCAGSGSTFRHHAMAWFRQTPGKEREFVSAINDHGDRTKYLDSVRGRFTISRDNTDNMVYLQMTDLRPEDTANYSCAAGPLVDYLETTPLVYTYWGHGTQVTVSS

SEQ ID NO: 813 - protein, 121 aa, synthetic construct
  REGION 1..121: note = Description of Artificial Sequence: Synthetic polypeptide
QVQLQESGGGLVQAGGSLRLSCAASGSIAYIYTMDWYRQAPGKQRELVATSTHDGNTDYADSVKGRFTISRDNAKNTVYLQMNSLKPEDTAVYYCNADLRTAVDLIRANYWGQGTQVTVSS

SEQ ID NO: 814 - protein, 121 aa, synthetic construct
  REGION 1..121: note = Description of Artificial Sequence: Synthetic polypeptide
QVQLQESGGGSVQAGGSLTLSCAASGSIAYIYTMDWYRQAPGKQRELVATSTHDGNTDYADSVKGRFTISRDNAKNTVYLQMNSLKPEDTAVYYCNADLRTAVDLIRANYWGQGTQVTVSS

SEQ ID NO: 815 - protein, 113 aa, synthetic construct
  REGION 1..113: note = Description of Artificial Sequence: Synthetic polypeptide
QVQLQESGGGLVQPGGSLRLSCTASVSIFSVNAVDWYRQSPGKERELVAIMTSDGSTNYGDSVKGRFTISRDNAKNTVYLQMNNLKPEDTAVYYCNTVPPRYWGQGTQVTVSS

SEQ ID NO: 816 - protein, 121 aa, synthetic construct
  REGION 1..121: note = Description of Artificial Sequence: Synthetic polypeptide
QVQLQESGGGLVQPGGSLRLSCAASGSIAYIYTMDWYRQAPGKQRELVATSTRDGNIDYADSVKGRFTISRDSAKNTVYLQMSSLKPEDTAVYYCNADLRTAVDLIRANYWGQGTQVTVSS

SEQ ID NO: 817 - protein, 119 aa, synthetic construct
  REGION 1..119: note = Description of Artificial Sequence: Synthetic polypeptide
QVQLQESGGGLVQAGGSLTLSCAASGRYQLAWFRQAPEKVREFVGTISSGDSTWYTNSVKGRFAISRDSARNTVYLQMNDLKPEDTAVYYCAAALYYRDSRRAADYPYWGQGTQVTVSS

SEQ ID NO: 818 - protein, 119 aa, synthetic construct
  REGION 1..119: note = Description of Artificial Sequence: Synthetic polypeptide
QVQLQESGGGSVQAGGSLRLSCAASGRYHMAWFRQAPEKEREFVGTISSGDSTWYTNSVKGRFAISRDSARNTAYLQMNDLKPEDTAVYYCAAALYYGDSRRAADYPYWGQGTQVTVSS

SEQ ID NO: 819 - protein, 121 aa, synthetic construct
  REGION 1..121: note = Description of Artificial Sequence: Synthetic polypeptide
QVQLQESGGGSVQAGGSLRLSCAASGSIAYIYTMDWYRQAPGKQRELVATSTHDGNTDYTDSVKGRFTISRDNAKNTVYLQMNSLKPEDTAVYYCNADLRTAVDLIRANYWGQGTQVTVSS

SEQ ID NO: 820 - protein, 121 aa, synthetic construct
  REGION 1..121: note = Description of Artificial Sequence: Synthetic polypeptide
QVQLQESGGGLVQAGGSLRLSCAASGSIAYIYTMDWYRQTPGKQRELVATSTRDANTDYAGSVKGRFTISRDNAKDTVYLQMNSLKPEDTAVYYCHADLRTAVDLIRANYWGQGTQVTVSS

SEQ ID NO: 821 - protein, 119 aa, synthetic construct
  REGION 1..119: note = Description of Artificial Sequence: Synthetic polypeptide
QVQLQESGGGLVQAGGSLRLSCAASGRYNMAWFRQAPEKEREFVGTITSADSTWYTNSVKGRFAITQDSARNTVYLQMNDLKPEDTAVYYCAAALYYGDSRRAADYPYWGQGTQVTVSS

SEQ ID NO: 822 - protein, 119 aa, synthetic construct
  REGION 1..119: note = Description of Artificial Sequence: Synthetic polypeptide
QVQLQESGGGLVQPGGSLRLSCAASGRYQMAWFRQAPEKEREFVGTISSGDSTWYTNSVKGRFAISRDSARTTVYLQMNDLKPEDTAVYYCAAALYYRDSWRAADYPYWGQGTQVTVSS

SEQ ID NO: 823 - protein, 119 aa, synthetic construct
  REGION 1..119: note = Description of Artificial Sequence: Synthetic polypeptide
QVQLQESGGGLVQPGESLRLSCAATGRYHLAWFRQAPEKEREFVGTITSADSTWYTNSVKGRFAITRDSARNTVYLQMNDLKPEDTAVYYCAAALYYGDSRRAADYPYWGQGTQVTVSS

SEQ ID NO: 824 - protein, 124 aa, synthetic construct
  REGION 1..124: note = Description of Artificial Sequence: Synthetic polypeptide
QVQLQESGGGLVQAGGSLKLSCADSGRSFSNYIMGWFRQAPGKEREFVAGLGWSPGNTYYADSVKGRFTISRDNAKNMVYLQMNSLNPEDTAVYYCAARRGDVIYTTPWNYVYWGQGTQVTVSS

SEQ ID NO: 825 - protein, 121 aa, synthetic construct
  REGION 1..121: note = Description of Artificial Sequence: Synthetic polypeptide
QVQLQESGGGLVQAGGSLRLSCAASGSIAYIYTMDWYRQAPGKQRELVATSTHDGNTDYADSVKGRFTISRDNAKNTVYLQMNSLKPEDTAVYYCNADLRTPVDLIRANYWGQGTQVTVSS

SEQ ID NO: 826 - protein, 119 aa, synthetic construct
  REGION 1..119: note = Description of Artificial Sequence: Synthetic polypeptide
QVQLQESGGGSVQAGGSLRLSCAAPGRYQMAWFRQAPEKEREFVGTISSGDSTWYTNSVKGRFAISRDSARNTVYLQMNDLKSEDTAVYYCAAALYYRDSRRAIDYPYWGQGTQVTVSS

SEQ ID NO: 827 - protein, 122 aa, synthetic construct
  REGION 1..122: note = Description of Artificial Sequence: Synthetic polypeptide
QVQLQESGGGSVQAGGSLRLSCAASGLTFSSYAMAWFRQAPGKQRELVARITSGGTTDYADSVKGRFTISRDNAKNTMYLQMNSLKPEDTAVYYCAADLTYRNLLLKLPHYWGQGTQVTVSS

SEQ ID NO: 828 - protein, 121 aa, synthetic construct
  REGION 1..121: note = Description of Artificial Sequence: Synthetic polypeptide
QVQLQESGGGLVQAGGSLRLSCAASGNIAYIYTMDWYRQAPGKQRELVATSTHDGSTDYADSVKGRFTISRDNAKNTVYLQMNSLKPEDTAVYYCNADLRTPVDLIRANYWGQGTQVTVSS

SEQ ID NO: 829 - protein, 121 aa, synthetic construct
  REGION 1..121: note = Description of Artificial Sequence: Synthetic polypeptide
QVQLQESGGGLVQPGGSLRLSCAASGSIAYIYTMDWYRQAPGKQRELVATSTWDGNTDYADSVKGRFTISRDNAKNTVYLQMNSLKPEDTAVYYCNADLRTAVDLIRANYWGQGTQVTVSS

SEQ ID NO: 830 - protein, 121 aa, synthetic construct
  REGION 1..121: note = Description of Artificial Sequence: Synthetic polypeptide
QVQLQESGGGLVQAGGSLRLSCAASGSIAYIYTMDWYRQAPGKQRELVATSTHDGNTDYADSVKGRFTISRDNAKNTVYLQMSSLKPDDTAVYYCNADLRTAVDLIRANYWGQGTQVTVSS

SEQ ID NO: 831 - protein, 123 aa, synthetic construct
  REGION 1..123: note = Description of Artificial Sequence: Synthetic polypeptide
QVQLQESGGGLVQAGESLSLSCAASGNDFVITDMHWYRQAPGKQREWVATITRFATTNYADSVKGRFTISRDNAKNTWYLQMNSLKPDDTAVYYCKAIGLRGVPDVNRQFEVWGQGTQVTVSS

SEQ ID NO: 832 - protein, 121 aa, synthetic construct
  REGION 1..121: note = Description of Artificial Sequence: Synthetic polypeptide
QVQLQESGGGLVQAGGSLRLSCAASGAIAYIYGMGWYRQAPGNQRELVAAISSGGSTDYADSVKGRFTISRDNAKNTVYLQMSSLKPEDTAVYYCNADVRTSRNLVRSDYWGQGTQVTVSS

SEQ ID NO: 833 - protein, 119 aa, synthetic construct
  REGION 1..119: note = Description of Artificial Sequence: Synthetic polypeptide
QVQLQESGGGLVQAGGSLRLSCAASGRYHTAWFRQAPEKEREFVGTISSGDSTWYTNSVKGRFAISRDSARNTVYLQMNDLKPEDTAVYYCAAALYYGDSRRAGDYPYWGQGTQVTVSS

SEQ ID NO: 834 - protein, 121 aa, synthetic construct
  REGION 1..121: note = Description of Artificial Sequence: Synthetic polypeptide
QVQLQESGGGLVQAGGSLRLSCAASGNIAYIYTMNWYRQAPGKQRELVATSTHAGNTDYADSVKGRFTISRDNAKNTVYLQMNSLKPEDTAVYYCNVDLRTAVDLIRANYWGQGTQVTVSS

SEQ ID NO: 835 - protein, 121 aa, synthetic construct
  REGION 1..121: note = Description of Artificial Sequence: Synthetic polypeptide
QVQLQESGGGLVQPGGSLRLSCAASGNIAYIYTMGWYRQAPGKQRELVATSTHDGNSDYADSVKGRFTISRDNAKNTVYLQMNTLKPDDTAVYYCNADLRTPVDRIRGNFWGQGTQVTVSS

SEQ ID NO: 836 - protein, 121 aa, synthetic construct
  REGION 1..121: note = Description of Artificial Sequence: Synthetic polypeptide
EVQLLESGGGLVQPGGSLTLSCAASGSIAYIYTMDWYRQAPGKQRELVATSTRDGNVDYADSVKGRFTISRDNSKNTLYLQMNSLRAEDTAVYYCNADLRTAVDLIRANYWGLGTQVTVSS

SEQ ID NO: 837 - protein, 125 aa, synthetic construct
  REGION 1..125: note = Description of Artificial Sequence: Synthetic polypeptide
EVQLLESGGGLVQPGGSLTLSCAASGRTDSWYVMGWFRQAPGKDREFVAGVSWSYGNTYYADSVKGRFTISRDNSKNTLYLQMNSLRAEDTAVYYCAARVSREVIPTRWDLYNYWGLGTQVTVSS

SEQ ID NO: 838 - protein, 127 aa, synthetic construct
  REGION 1..127: note = Description of Artificial Sequence: Synthetic polypeptide
EVQLLESGGGLVQPGGSLTLSCAASARTLRLYAVGWFRQAPGKEREFVAGIGRSERTYYTDSVKGRFTISRDNSKNTLYLQMNSLRAEDTAVYYCALTFQTTDMVDVPTTQHEYDYWGLGTQVTVSS

SEQ ID NO: 839 - protein, 114 aa, synthetic construct
  REGION 1..114: note = Description of Artificial Sequence: Synthetic polypeptide
EVQLLESGGGLVQPGGSLTLSCAASGSIVTINAMTWYRQAPGKRRELVAIITSGGETNYADSVKGRFTISRDNSKNTLYLQMNSLRAEDTAVYYCNVVPPLGSWGLGTQVTVSS

SEQ ID NO: 840 - protein, 119 aa, synthetic construct
  REGION 1..119: note = Description of Artificial Sequence: Synthetic polypeptide
EVQLLESGGGLVQPGGSLTLSCAASGRYHMAWFRQAPGKEREFVGTISSGDSTWYTNSVKGRFTISRDNSKNTLYLQMNSLRAEDTAVYYCAAALYYGDSRRAADYPYWGLGTQVTVSS

SEQ ID NO: 841 - protein, 125 aa, synthetic construct
  REGION 1..125: note = Description of Artificial Sequence: Synthetic polypeptide
EVQLLESGGGLVQPGGSLTLSCAASGSTFRHHAMAWFRQTPGKEREFVSAINDHGDRTKYLDSVKGRFTISRDNSKNTLYLQMNSLRAEDTAVYYCAAGPLVDYLETTPLVYTYWGLGTQVTVSS

SEQ ID NO: 842 - protein, 124 aa, synthetic construct
  REGION 1..124: note = Description of Artificial Sequence: Synthetic polypeptide
EVQLLESGGGLVQPGGSLTLSCAASGRSFSNYIMGWFRQAPGKEREFVAGLGWSPGNTYYADSVKGRFTISRDNSKNTLYLQMNSLRAEDTAVYYCAARRGDVIYTTPWNYVYWGLGTQVTVSS

SEQ ID NO: 843 - protein, 122 aa, synthetic construct
  REGION 1..122: note = Description of Artificial Sequence: Synthetic polypeptide
EVQLLESGGGLVQPGGSLTLSCAASGLTFSSYAMAWFRQAPGKQRELVARITSGGTTDYADSVKGRFTISRDNSKNTLYLQMNSLRAEDTAVYYCAADLTYRNLLLKLPHYWGLGTQVTVSS

SEQ ID NO: 844 - protein, 113 aa, synthetic construct
  REGION 1..113: note = Description of Artificial Sequence: Synthetic polypeptide
EVQLLESGGGLVQPGGSLTLSCAASVSIFSVNAVDWYRQSPGKERELVAIMTSDGSTNYDDSVKGRFTISRDNSKNTLYLQMNSLRAEDTAVYYCNTVPPRYWGLGTQVTVSS

SEQ ID NO: 845 - protein, 123 aa, synthetic construct
  REGION 1..123: note = Description of Artificial Sequence: Synthetic polypeptide
EVQLLESGGGLVQPGGSLTLSCAASGNDFVITDMHWYRQAPGKQREWVATITRFATTNYADSVKGRFTISRDNSKNTLYLQMNSLRAEDTAVYYCKAIGLRGVPDVNRQFEVWGLGTQVTVSS

SEQ ID NO: 846 - protein, 121 aa, synthetic construct
  REGION 1..121: note = Description of Artificial Sequence: Synthetic polypeptide
EVQLLESGGGLVQPGGSLTLSCAASGAIAYIYGMGWYRQAPGKQRELVAAISSGGSTDYADSVKGRFTISRDNSKNTLYLQMNSLRAEDTAVYYCNADVRTSRNLVRSDYWGLGTQVTVSS

SEQ ID NO: 847 - protein, 10 aa, synthetic construct
  REGION 1..10: note = Description of Artificial Sequence: Synthetic peptide
GFIFRAASMA

SEQ ID NO: 848 - protein, 10 aa, synthetic construct
  REGION 1..10: note = Description of Artificial Sequence: Synthetic peptide
GFIFRAASMG

SEQ ID NO: 849 - protein, 10 aa, synthetic construct
  REGION 1..10: note = Description of Artificial Sequence: Synthetic peptide
GFIFRAASMD

SEQ ID NO: 850 - protein, 10 aa, synthetic construct
  REGION 1..10: note = Description of Artificial Sequence: Synthetic peptide
GFIFRAASMG

SEQ ID NO: 851 - protein, 10 aa, synthetic construct
  REGION 1..10: note = Description of Artificial Sequence: Synthetic peptide
GFIFRAASMD

SEQ ID NO: 852 - protein, 10 aa, synthetic construct
  REGION 1..10: note = Description of Artificial Sequence: Synthetic peptide
GDTFLRYAMG

SEQ ID NO: 853 - protein, 10 aa, synthetic construct
  REGION 1..10: note = Description of Artificial Sequence: Synthetic peptide
GDTFLRYAMG

SEQ ID NO: 854 - protein, 10 aa, synthetic construct
  REGION 1..10: note = Description of Artificial Sequence: Synthetic peptide
GDTFLRYAMG

SEQ ID NO: 855 - protein, 10 aa, synthetic construct
  REGION 1..10: note = Description of Artificial Sequence: Synthetic peptide
GDTFLRYAMG

SEQ ID NO: 856 - protein, 10 aa, synthetic construct
  REGION 1..10: note = Description of Artificial Sequence: Synthetic peptide
GFTFSSYYMS

SEQ ID NO: 857 - protein, 10 aa, synthetic construct
  REGION 1..10: note = Description of Artificial Sequence: Synthetic peptide
GFTFSSYYMS

SEQ ID NO: 858 - protein, 10 aa, synthetic construct
  REGION 1..10: note = Description of Artificial Sequence: Synthetic peptide
GFTFSDWAMS

SEQ ID NO: 859 - protein, 10 aa, synthetic construct
  REGION 1..10: note = Description of Artificial Sequence: Synthetic peptide
GFTFSDWAMS

SEQ ID NO: 860 - protein, 10 aa, synthetic construct
  REGION 1..10: note = Description of Artificial Sequence: Synthetic peptide
GNVFRAATMA

SEQ ID NO: 861 - protein, 10 aa, synthetic construct
  REGION 1..10: note = Description of Artificial Sequence: Synthetic peptide
GNVFRAATMA

SEQ ID NO: 862 - protein, 10 aa, synthetic construct
  REGION 1..10: note = Description of Artificial Sequence: Synthetic peptide
GNVFRAATMA

SEQ ID NO: 863 - protein, 10 aa, synthetic construct
  REGION 1..10: note = Description of Artificial Sequence: Synthetic peptide
GFAFGNHWMY

SEQ ID NO: 864 - protein, 10 aa, synthetic construct
  REGION 1..10: note = Description of Artificial Sequence: Synthetic peptide
GFAFGNHWMY

SEQ ID NO: 865 - protein, 10 aa, synthetic construct
  REGION 1..10: note = Description of Artificial Sequence: Synthetic peptide
GFAFGNHWMY

SEQ ID NO: 866 - protein, 10 aa, synthetic construct
  REGION 1..10: note = Description of Artificial Sequence: Synthetic peptide
GFIFRAASIS

SEQ ID NO: 867 - protein, 10 aa, synthetic construct
  REGION 1..10: note = Description of Artificial Sequence: Synthetic peptide
GFIFRAASMG

SEQ ID NO: 868 - protein, 10 aa, synthetic construct
  REGION 1..10: note = Description of Artificial Sequence: Synthetic peptide
EYILSMYRMA

SEQ ID NO: 869 - protein, 10 aa, synthetic construct
  REGION 1..10: note = Description of Artificial Sequence: Synthetic peptide
EYILSMYRMA

SEQ ID NO: 870 - protein, 10 aa, synthetic construct
  REGION 1..10: note = Description of Artificial Sequence: Synthetic peptide
ESISSFIAVG

SEQ ID NO: 871 - protein, 10 aa, synthetic construct
  REGION 1..10: note = Description of Artificial Sequence: Synthetic peptide
ESISSFIAVG

SEQ ID NO: 872 - protein, 10 aa, synthetic construct
  REGION 1..10: note = Description of Artificial Sequence: Synthetic peptide
GSVFRANVMG

SEQ ID NO: 873 - protein, 10 aa, synthetic construct
  REGION 1..10: note = Description of Artificial Sequence: Synthetic peptide
GRTSSIFGMG

SEQ ID NO: 874 - protein, 12 aa, synthetic construct
  REGION 1..12: note = Description of Artificial Sequence: Synthetic peptide
GPIFSDTIRTMG

SEQ ID NO: 875 - protein, 10 aa, synthetic construct
  REGION 1..10: note = Description of Artificial Sequence: Synthetic peptide
GSIFGINAMG

SEQ ID NO: 876 - protein, 10 aa, synthetic construct
  REGION 1..10: note = Description of Artificial Sequence: Synthetic peptide
ANRFNINVMG

SEQ ID NO: 877 - protein, 8 aa, synthetic construct
  REGION 1..8: note = Description of Artificial Sequence: Synthetic peptide
GTILSTMA

SEQ ID NO: 878 - protein, 10 aa, synthetic construct
  REGION 1..10: note = Description of Artificial Sequence: Synthetic peptide
GSIFSLNTLA

SEQ ID NO: 879 - protein, 10 aa, synthetic construct
  REGION 1..10: note = Description of Artificial Sequence: Synthetic peptide
GIIFRGTTMG

SEQ ID NO: 880 - protein, 10 aa, synthetic construct
  REGION 1..10: note = Description of Artificial Sequence: Synthetic peptide
GFTLDDYTIG

SEQ ID NO: 881 - protein, 10 aa, synthetic construct
  REGION 1..10: note = Description of Artificial Sequence: Synthetic peptide
GNIVRMTNMA

SEQ ID NO: 882 - protein, 10 aa, synthetic construct
  REGION 1..10: note = Description of Artificial Sequence: Synthetic peptide
GFAFNDHAIL

SEQ ID NO: 883 - protein, 10 aa, synthetic construct
  REGION 1..10: note = Description of Artificial Sequence: Synthetic peptide
GSIFRASTMA

SEQ ID NO: 884 - protein, 10 aa, synthetic construct
  REGION 1..10: note = Description of Artificial Sequence: Synthetic peptide
GRINSINTMG

SEQ ID NO: 885 - protein, 16 aa, synthetic construct
  REGION 1..16: note = Description of Artificial Sequence: Synthetic peptide
SISSGAFTNYADSVKA

SEQ ID NO: 886 - protein, 16 aa, synthetic construct
  REGION 1..16: note = Description of Artificial Sequence: Synthetic peptide
TVSSGDFTNYADSVKG

SEQ ID NO: 887 - protein, 16 aa, synthetic construct
  REGION 1..16: note = Description of Artificial Sequence: Synthetic peptide
TISSGGFTNYADSVKG

SEQ ID NO: 888 - protein, 16 aa, synthetic construct
  REGION 1..16: note = Description of Artificial Sequence: Synthetic peptide
TVSSGGFTNYADSVKG

SEQ ID NO: 889 - protein, 16 aa, synthetic construct
  REGION 1..16: note = Description of Artificial Sequence: Synthetic peptide
TISSTGFTNYANSVKG

SEQ ID NO: 890 - protein, 17 aa, synthetic construct
  REGION 1..17: note = Description of Artificial Sequence: Synthetic peptide
AITWNGGNTDYAGSLKG

SEQ ID NO: 891 - protein, 17 aa, synthetic construct
  REGION 1..17: note = Description of Artificial Sequence: Synthetic peptide
AITWNGGNTDYAGSLKG

SEQ ID NO: 892 - protein, 17 aa, synthetic construct
  REGION 1..17: note = Description of Artificial Sequence: Synthetic peptide
AITWNGGNTDYADSLKG

SEQ ID NO: 893 - protein, 17 aa, synthetic construct
  REGION 1..17: note = Description of Artificial Sequence: Synthetic peptide
AITWNGGNTDYAGSLKG

SEQ ID NO: 894 - protein, 17 aa, synthetic construct
  REGION 1..17: note = Description of Artificial Sequence: Synthetic peptide
GIHYTGDWTNYADSVKG

SEQ ID NO: 895 - protein, 17 aa, synthetic construct
  REGION 1..17: note = Description of Artificial Sequence: Synthetic peptide
GIHYTGDWTNYADSVKG

SEQ ID NO: 896 - protein, 17 aa, synthetic construct
  REGION 1..17: note = Description of Artificial Sequence: Synthetic peptide
GIHYGDHTTHYADFVKG

SEQ ID NO: 897 - protein, 17 aa, synthetic construct
  REGION 1..17: note = Description of Artificial Sequence: Synthetic peptide
SIHYGDHTTHYADFVKG

SEQ ID NO: 898 - protein, 16 aa, synthetic construct
  REGION 1..16: note = Description of Artificial Sequence: Synthetic peptide
TIASGGTTNYADFVKG

SEQ ID NO: 899 - protein, 16 aa, synthetic construct
  REGION 1..16: note = Description of Artificial Sequence: Synthetic peptide
TIASGGTTNYADFVKG

SEQ ID NO: 900 - protein, 16 aa, synthetic construct
  REGION 1..16: note = Description of Artificial Sequence: Synthetic peptide
TIASGGTTNYADFVKG

SEQ ID NO: 901 - protein, 16 aa, synthetic construct
  REGION 1..16: note = Description of Artificial Sequence: Synthetic peptide
SISSGGSTNYVDSVKG

SEQ ID NO: 902 - protein, 16 aa, synthetic construct
  REGION 1..16: note = Description of Artificial Sequence: Synthetic peptide
SISSGGSTNYVDSVKG

SEQ ID NO: 903 - protein, 16 aa, synthetic construct
  REGION 1..16: note = Description of Artificial Sequence: Synthetic peptide
SISSGGSTNYVDSVKG

SEQ ID NO: 904 - protein, 16 aa, synthetic construct
  REGION 1..16: note = Description of Artificial Sequence: Synthetic peptide
TINSGGFTNYADSVLG

SEQ ID NO: 905 - protein, 16 aa, synthetic construct
  REGION 1..16: note = Description of Artificial Sequence: Synthetic peptide
TINSGGFTNYADSVKG

SEQ ID NO: 906 - protein, 16 aa, synthetic construct
  REGION 1..16: note = Description of Artificial Sequence: Synthetic peptide
DMSSGGTTNYADFVKG

SEQ ID NO: 907 - protein, 16 aa, synthetic construct
  REGION 1..16: note = Description of Artificial Sequence: Synthetic peptide
DMSSGGTTNYADFVKG

SEQ ID NO: 908 - protein, 16 aa, synthetic construct
  REGION 1..16: note = Description of Artificial Sequence: Synthetic peptide
GINRSGFTYYTDSVKG

SEQ ID NO: 909 - protein, 16 aa, synthetic construct
  REGION 1..16: note = Description of Artificial Sequence: Synthetic peptide
GINRSGFTYYTDSVKG

SEQ ID NO: 910 - protein, 16 aa, synthetic construct
  REGION 1..16: note = Description of Artificial Sequence: Synthetic peptide
RIDPGGTTTYADPVKG

SEQ ID NO: 911 - protein, 17 aa, synthetic construct
  REGION 1..17: note = Description of Artificial Sequence: Synthetic peptide
SINWSGGSTSYADSVKG

SEQ ID NO: 912 - protein, 17 aa, synthetic construct
  REGION 1..17: note = Description of Artificial Sequence: Synthetic peptide
TIASFPSRTNYVDSVKG

SEQ ID NO: 913 - protein, 16 aa, synthetic construct
  REGION 1..16: note = Description of Artificial Sequence: Synthetic peptide
FITIGGNTNYLDSVKG

SEQ ID NO: 914 - protein, 16 aa, synthetic construct
  REGION 1..16: note = Description of Artificial Sequence: Synthetic peptide
TINIGGSTDYADSVKG

SEQ ID NO: 915 - protein, 16 aa, synthetic construct
  REGION 1..16: note = Description of Artificial Sequence: Synthetic peptide
TISRGGTTNYSDSVKG

SEQ ID NO: 916 - protein, 16 aa, synthetic construct
  REGION 1..16: note = Description of Artificial Sequence: Synthetic peptide
RITGGGTTVYADSVKG

SEQ ID NO: 917 - protein, 16 aa, synthetic construct
  REGION 1..16: note = Description of Artificial Sequence: Synthetic peptide
SISPLGTTSYSGSVEG

SEQ ID NO: 918 - protein, 17 aa, synthetic construct
  REGION 1..17: note = Description of Artificial Sequence: Synthetic peptide
CISRRDDSTYYADSVKG

SEQ ID NO: 919 - protein, 16 aa, synthetic construct
  REGION 1..16: note = Description of Artificial Sequence: Synthetic peptide
TISAGGSTTYVDSVKD

SEQ ID NO: 920 - protein, 16 aa, synthetic construct
  REGION 1..16: note = Description of Artificial Sequence: Synthetic peptide
EICRDGTTYYTDSVKG

SEQ ID NO: 921 - protein, 16 aa, synthetic construct
  REGION 1..16: note = Description of Artificial Sequence: Synthetic peptide
QIMSGGGTNYAGSVKG

SEQ ID NO: 922 - protein, 16 aa, synthetic construct
  REGION 1..16: note = Description of Artificial Sequence: Synthetic peptide
EITRGGTTNYADSVQG

SEQ ID NO: 923 - protein, 11 aa, synthetic construct
  REGION 1..11: note = Description of Artificial Sequence: Synthetic peptide
TFLRSDGHHTI

SEQ ID NO: 924 - protein, 11 aa, synthetic construct
  REGION 1..11: note = Description of Artificial Sequence: Synthetic peptide
TFVRSDGHHTI

SEQ ID NO: 925 - protein, 11 aa, synthetic construct
  REGION 1..11: note = Description of Artificial Sequence: Synthetic peptide
TFLRSDGHHTI

SEQ ID NO: 926 - protein, 11 aa, synthetic construct
  REGION 1..11: note = Description of Artificial Sequence: Synthetic peptide
TFVRSDGHHTI

SEQ ID NO: 927 - protein, 11 aa, synthetic construct
  REGION 1..11: note = Description of Artificial Sequence: Synthetic peptide
TFLRSDGQHSI

SEQ ID NO: 928 - protein, 15 aa, synthetic construct
  REGION 1..15: note = Description of Artificial Sequence: Synthetic peptide
DLTFGLASSHYQYDY

SEQ ID NO: 929 - protein, 15 aa, synthetic construct
  REGION 1..15: note = Description of Artificial Sequence: Synthetic peptide
DLTFGLASSHYQYDY

SEQ ID NO: 930 - protein, 15 aa, synthetic construct
  REGION 1..15: note = Description of Artificial Sequence: Synthetic peptide
DLTFGLASSHYQYDY

SEQ ID NO: 931 - protein, 15 aa, synthetic construct
  REGION 1..15: note = Description of Artificial Sequence: Synthetic peptide
DLTFGLASSHYQYDY

SEQ ID NO: 932-935 - skipped (4 entries)

SEQ ID NO: 936 - protein, 11 aa, synthetic construct
  REGION 1..11: note = Description of Artificial Sequence: Synthetic peptide
GYLTSLGPKNY

SEQ ID NO: 937 - protein, 11 aa, synthetic construct
  REGION 1..11: note = Description of Artificial Sequence: Synthetic peptide
GYLTSLGPKNY

SEQ ID NO: 938 - protein, 11 aa, synthetic construct
  REGION 1..11: note = Description of Artificial Sequence: Synthetic peptide
LYLTSLGPKSY

SEQ ID NO: 939-941 - skipped (3 entries)

SEQ ID NO: 942 - protein, 11 aa, synthetic construct
  REGION 1..11: note = Description of Artificial Sequence: Synthetic peptide
TFLRSDGQPPI

SEQ ID NO: 943 - protein, 11 aa, synthetic construct
  REGION 1..11: note = Description of Artificial Sequence: Synthetic peptide
TFLRSDGQPPI

SEQ ID NO: 944 - protein, 14 aa, synthetic construct
  REGION 1..14: note = Description of Artificial Sequence: Synthetic peptide
AGRTGPPSYDAFNN

SEQ ID NO: 945 - protein, 14 aa, synthetic construct
  REGION 1..14: note = Description of Artificial Sequence: Synthetic peptide
AGRTGPPSYDAFNN

SEQ ID NO: 946 - protein, 14 aa, synthetic construct
  REGION 1..14: note = Description of Artificial Sequence: Synthetic peptide
GGLYFSNAYTQGDY

SEQ ID NO: 947 - protein, 14 aa, synthetic construct
  REGION 1..14: note = Description of Artificial Sequence: Synthetic peptide
GGLYFSNAYTQGDY

SEQ ID NO: 948 - protein, 11 aa, synthetic construct
  REGION 1..11: note = Description of Artificial Sequence: Synthetic peptide
IILLSGGPKDY

SEQ ID NO: 949 - protein, 11 aa, synthetic construct
  REGION 1..11: note = Description of Artificial Sequence: Synthetic peptide
AVLTNKPSWNF

SEQ ID NO: 950 - protein, 10 aa, synthetic construct
  REGION 1..10: note = Description of Artificial Sequence: Synthetic peptide
DLASIPTKTY

SEQ ID NO: 951 - protein, 12 aa, synthetic construct
  REGION 1..12: note = Description of Artificial Sequence: Synthetic peptide
NPPLILTAGGLY

SEQ ID NO: 952 - protein, 13 aa, synthetic construct
  REGION 1..13: note = Description of Artificial Sequence: Synthetic peptide
KLRVSGPTGPNVY

SEQ ID NO: 953 - protein, 10 aa, synthetic construct
  REGION 1..10: note = Description of Artificial Sequence: Synthetic peptide
PLTDYGMGYN

SEQ ID NO: 954 - protein, 12 aa, synthetic construct
  REGION 1..12: note = Description of Artificial Sequence: Synthetic peptide
MVRHPSGSTYEY

SEQ ID NO: 955 - protein, 11 aa, synthetic construct
  REGION 1..11: note = Description of Artificial Sequence: Synthetic peptide
IQVTNVGPRVY

SEQ ID NO: 956 - protein, 15 aa, synthetic construct
  REGION 1..15: note = Description of Artificial Sequence: Synthetic peptide
TPRSYTLRCLGKFDF

SEQ ID NO: 957 - protein, 13 aa, synthetic construct
  REGION 1..13: note = Description of Artificial Sequence: Synthetic peptide
GSILTNRGAIPGS

SEQ ID NO: 958 - protein, 19 aa, synthetic construct
  REGION 1..19: note = Description of Artificial Sequence: Synthetic peptide
DRRRYYCSGNRAFSSDYYY

SEQ ID NO: 959 - protein, 11 aa, synthetic construct
  REGION 1..11: note = Description of Artificial Sequence: Synthetic peptide
AQITSWGPKVY

SEQ ID NO: 960 - protein, 14 aa, synthetic construct
  REGION 1..14: note = Description of Artificial Sequence: Synthetic peptide
QTFPTFSRPTGLDY

SEQ ID NO: 961 - protein, 119 aa, synthetic construct
  REGION 1..119: note = Description of Artificial Sequence: Synthetic polypeptide
QVQLQESGGGLVQAGGSLRLSCAASGFIFRAASMAWYRQSPGNERELVASISSGAFTNYADSVKARFTISRDNAKNTVYLQMNSLKPEDTAVYFCGATFLRSDGHHTINGQGTQVTVSS

SEQ ID NO: 962 - protein, 119 aa, synthetic construct
  REGION 1..119: note = Description of Artificial Sequence: Synthetic polypeptide
QVQLQESGGGLVQAGGSLRLSCAASGFIFRAASMGWFRQSPGNERELVATVSSGDFTNYADSVKGRFTISRDNAKNTVYLQMNSLKPEDTAVYFCGATFVRSDGHHTIYGQGTQVTVSS

SEQ ID NO: 963 - protein, 119 aa, synthetic construct
  REGION 1..119: note = Description of Artificial Sequence: Synthetic polypeptide
QVQLQESGGGLVQAGGSLRLSCAASGFIFRAASMDWYRQFPGNERESIATISSGGFTNYADSVKGRFTISRDNAKNTVYLQMNSLKPEDTAVYFCGATFLRSDGHHTINGQGTQVTVSS

SEQ ID NO: 964 - protein, 119 aa, synthetic construct
  REGION 1..119: note = Description of Artificial Sequence: Synthetic polypeptide
QVQLQESGGGLVQAGGSLRLSCAASGFIFRAASMGWFRQSPGNERELVATVSSGGFTNYADSVKGRFTISRDNAKNTVYLQMNSLKPEDTAVYFCGATFVRSDGHHTIYGQGTQVTVSS

SEQ ID NO: 965 - protein, 119 aa, synthetic construct
  REGION 1..119: note = Description of Artificial Sequence: Synthetic polypeptide
QVQLQESGGGLVQAGGSLRLSCAASGFIFRAASMDWYRQSPGTQPELVATISSTGFTNYANSVKGRFTISRDNAKNTVYLQMNSLKPEDTAVYFCGATFLRSDGQHSIYGQGTQVTVSS

SEQ ID NO: 966 - protein, 124 aa, synthetic construct
  REGION 1..124: note = Description of Artificial Sequence: Synthetic polypeptide
QVQLQESGGGLVHTGGSLRLSCAASGDTFLRYAMGWFRQAPGKEREFVAAITWNGGNTDYAGSLKGRFTISRDNTKNTVYLQMNSLKPEDTAVYYCAADLTFGLASSHYQYDYWGQGTQVTVSS

SEQ ID NO: 967 - protein, 124 aa, synthetic construct
  REGION 1..124: note = Description of Artificial Sequence: Synthetic polypeptide
QVQLQESGGGLVQAGGSLRLSCAASGDTFLRYAMGWFRQAPGKEREFVAAITWNGGNTDYAGSLKGRFTISRDNTKNTVYLQMNSLKPEDTAVYYCAADLTFGLASSHYQYDYWGQGTQVTVSS

SEQ ID NO: 968 - protein, 124 aa, synthetic construct
  REGION 1..124: note = Description of Artificial Sequence: Synthetic polypeptide
QVQLQESGGGLVHTGGSLRLSCAFSGDTFLRYAMGWFRQAPGKEREFVAAITWNGGNTDYADSLKGRFTISRDNTKNTVYLQMNSLRPEDTAVYYCAADLTFGLASSHYQYDYWGQGTQVTVSS

SEQ ID NO: 969 - protein, 124 aa, synthetic construct
  REGION 1..124: note = Description of Artificial Sequence: Synthetic polypeptide
QVQLQESGGGLVQPGGSLRLSCAASGDTFLRYAMGWFRQAPGKEREFVAAITWNGGNTDYAGSLKGRFTISRDNTKNTVYLQMNSLKPEDTAVYYCAADLTFGLASSHYQYDYWGQGTQVTVSS

SEQ ID NO: 970 - protein, 112 aa, synthetic construct
  REGION 1..112: note = Description of Artificial Sequence: Synthetic polypeptide
QVQLQESGGGSVLAGGSLRLSCAASGFTFSSYYMSWVRQAPGKGLEWVSGIHYTGDWTNYADSVKGRFTISRDNAKNELYLEMNNLKPEDTAVYYCARGSDKGQGTQVTVSS

SEQ ID NO: 971 - protein, 112 aa, synthetic construct
  REGION 1..112: note = Description of Artificial Sequence: Synthetic polypeptide
QVQLQESGGGSVQAGGSLRLSCAASGFTFSSYYMSWVRQAPGKGLEWVSGIHYTGDWTNYADSVKGRFTISRDNAKNELYLEMNNLKPEDTAVYYCARGSDKGQGTQVTVSS

SEQ ID NO: 972 - protein, 112 aa, synthetic construct
  REGION 1..112: note = Description of Artificial Sequence: Synthetic polypeptide
QVQLQESGGGLVQPGGSLRLSCAASGFTFSDWAMSWVRQAPGKGLEWVSGIHYGDHTTHYADFVKGRFTISRDDAKNTLYLQMNSLKPEDTAVYYCARGSTKGQGTQVTVSS

SEQ ID NO: 973 - protein, 112 aa, synthetic construct
  REGION 1..112: note = Description of Artificial Sequence: Synthetic polypeptide
QVQLQESGGGLVQPGGSLRLSCAASGFTFSDWAMSWVRQAPGKGLEWVSSIHYGDHTTHYADFVKGRFTISRDDAKNTLYLQMNSLKPEDTAVYYCEKGTTRGQGTQVTVSS

SEQ ID NO: 974 - protein, 119 aa, synthetic construct
  REGION 1..119: note = Description of Artificial Sequence: Synthetic polypeptide
QVQLQESGGGLVQAGGSLKLSCAASGNVFRAATMAWYRQAPEKQREMVATIASGGTTNYADFVKGRFTISRDNAKNTVYLQMNTLKPEDTAVYYCNAGYLTSLGPKNYWGQGTQVTVSS

SEQ ID NO: 975 - protein, 119 aa, synthetic construct
  REGION 1..119: note = Description of Artificial Sequence: Synthetic polypeptide
  VARIANT 44: note = MOD_RES - Any amino acid
QVQLQESGGGLVQPGGSLRLSCAASGNVFRAATMAWYRQAPEKXREMVATIASGGTTNYADFVKGRFTISRDNAKNTVYLQMNTLKPEDTAVYYCNAGYLTSLGPKNYWGQGTQVTVSS

SEQ ID NO: 976 - protein, 119 aa, synthetic construct
  REGION 1..119: note = Description of Artificial Sequence: Synthetic polypeptide
QVQLQESGGGLVQAGGSLRLSCAASGNVFRAATMAWYRQVPEKQREMVATIASGGTTNYADFVKGRFTISRDNAKNTVYLQMNTLKPEDTAVYYCNALYLTSLGPKSYWGQGTQVTVSS

SEQ ID NO: 977 - protein, 111 aa, synthetic construct
  REGION 1..111: note = Description of Artificial Sequence: Synthetic polypeptide
QVQLQESGGGLVQPGGSLRLSCAASGFAFGNHWMYWYRQAPGRGRELVASISSGGSTNYVDSVKGRFTISRDNARNTVYLQMYSLKPEDTAVYYCGTSDNWGQGTQVTVSS

SEQ ID NO: 978 - protein, 111 aa, synthetic construct
  REGION 1..111: note = Description of Artificial Sequence: Synthetic polypeptide
QVQLQESGGGLVQAGGSLRLSCAASGFAFGNHWMYWYRQAPGRGRELVASISSGGSTNYVDSVKGRFTISRDNARNTVYLQMYSLRPEDTAVYYCGTSDNWGQGTQVTVSS

SEQ ID NO: 979 - protein, 111 aa, synthetic construct
  REGION 1..111: note = Description of Artificial Sequence: Synthetic polypeptide
QVQLQESGGGLVQAGGSLRLSCAASGFAFGNHWMYWYRQAPGRGRELVASISSGGSTNYVDSVKGRFTISRDNARNTVYLQMYSLKPEDTAVYYCGTSDNWGQGTQVTVSS

SEQ ID NO: 980 - protein, 119 aa, synthetic construct
  REGION 1..119: note = Description of Artificial Sequence: Synthetic polypeptide
QVQLQESGGGLVQAGGSLRLSCAASGFIFRAASISWYRQSPGNERELVATINSGGFTNYADSVLGRFTISRDNAKNTGYLQMNSLKPEDTAVYFCAATFLRSDGQPPIWGQGTQVTVSS

SEQ ID NO: 981 - protein, 119 aa, synthetic construct
  REGION 1..119: note = Description of Artificial Sequence: Synthetic polypeptide
QVQLQESGGGLVQAGGSLRLSCAASGFIFRAASMGWYRQSPGNERELVATINSGGFTNYADSVKGRFTISRDNAKNTGYLQMNSLKPEDTAVYFCAATFLRSDGQPPIWGQGTQVTVSS

SEQ ID NO: 982 - protein, 122 aa, synthetic construct
  REGION 1..122: note = Description of Artificial Sequence: Synthetic polypeptide
QVQLQESGGGLVQAGGSLRLSCAASEYILSMYRMAWYRQAPGKVRELVADMSSGGTTNYADFVKGRFTISRDNDRNTVYLQMNRLQPEDTAAYYCNVAGRTGPPSYDAFNNWGQGTQVTVSS

SEQ ID NO: 983 - protein, 122 aa, synthetic construct
  REGION 1..122: note = Description of Artificial Sequence: Synthetic polypeptide
QVQLQESGGGLVQPGASLRVSCAASEYILSMYRMAWYRQAPGKVRELVADMSSGGTTNYADFVKGRFTISRDNDRNTVYLQMNRLQPEDTAAYYCNVAGRTGPPSYDAFNNWGQGTQVTVSS

SEQ ID NO: 984 - protein, 122 aa, synthetic construct
  REGION 1..122: note = Description of Artificial Sequence: Synthetic polypeptide
QVQLQESGGGLVQPGGSLRLSCAASESISSFIAVGWYRQAPGKERELVAGINRSGFTYYTDSVKGRFSISRDNAKNTVLLQMTSLKPEDTAVYYCNAGGLYFSNAYTQGDYWGQGTQVTVSS

SEQ ID NO: 985 - protein, 122 aa, synthetic construct
  REGION 1..122: note = Description of Artificial Sequence: Synthetic polypeptide
QVQLQESGGGLVQTGGSLRLSCAASESISSFIAVGWYRQAPGKERELVAGINRSGFTYYTDSVKGRFSISRDNAKNTVLLQMTSLKPEDTAVYYCNAGGLYFSNAYTQGDYWGQGTQVTVSS

SEQ ID NO: 986 - protein, 119 aa, synthetic construct
  REGION 1..119: note = Description of Artificial Sequence: Synthetic polypeptide
QVQLQESGGGLVQAGGSLRLSCAASGSVFRANVMGWYRQAPGKQHELVARIDPGGTTTYADPVKGRFTISRDNAKKTVYLQMNSLKPDDTAVYYCNAIILLSGGPKDYWGQGTQVTVSS

SEQ ID NO: 987 - protein, 120 aa, synthetic construct
  REGION 1..120: note = Description of Artificial Sequence: Synthetic polypeptide
QVQLQESGGGLVQAGGSLRLSCAPSGRTSSIFGMGWFRQAPGKEREFVASINWSGGSTSYADSVKGRFTISRDNAKNEMYLQMNSLKFEDTAVYVCAAAVLTNKPSWNFWGQGTQVTVSS

SEQ ID NO: 988 - protein, 121 aa, synthetic construct
  REGION 1..121: note = Description of Artificial Sequence: Synthetic polypeptide
QVQLQESGGGLVQAGGSLRLSCAASGPIFSDTIRTMGWYRQAAGKQRELVATIASFPSRTNYVDSVKGRFTISRDIAKNTVYLQMDSLKPEDTAVYYCNVDLASIPTKTYWGQGTQVTVSS

SEQ ID NO: 989 - protein, 120 aa, synthetic construct
  REGION 1..120: note = Description of Artificial Sequence: Synthetic polypeptide
QVQLQESGGGLVQAGGSLRLSCAASGSIFGINAMGWYRQAPGKQRESVAFITIGGNTNYLDSVKGRFTISRDNAKNTVYLQMNGLKPEDTAVYYCNTNPPLILTAGGLYWGQGTQVTVSS

SEQ ID NO: 990 - protein, 121 aa, synthetic construct
  REGION 1..121: note = Description of Artificial Sequence: Synthetic polypeptide
QVQLQESGGGLVQPGGSLRLSCATSANRFNINVMGWYRQAPGQQRELVATINIGGSTDYADSVKGRFTISRDNAKNTVYLQLSDLKPEDTAVYYCNVKLRVSGPTGPNVYWGQGTQVTVSS

SEQ ID NO: 991 - protein, 116 aa, synthetic construct
  REGION 1..116: note = Description of Artificial Sequence: Synthetic polypeptide
QVQLQESGGGLVQAGGSLKLSCTASGTILSTMAWYRQAPGKQRELVATISRGGTTNYSDSVKGRFAISRDSTKNTVYLQMNSLKPEDTAVYYCNTPLTDYGMGYNWGQGTQVTVSS

SEQ ID NO: 992 - protein, 120 aa, synthetic construct
  REGION 1..120: note = Description of Artificial Sequence: Synthetic polypeptide
QVQLQESGGGLVQAGGSLRLSCAVSGSIFSLNTLAWYRQAPGRQRDLIARITGGGTTVYADSVKGRFTISRDNAKNTVYLQMNSLKPEDTAVYYCNLMVRHPSGSTYEYWGQGTQVTVSS

SEQ ID NO: 993 - protein, 119 aa, synthetic construct
  REGION 1..119: note = Description of Artificial Sequence: Synthetic polypeptide
QVQLQESGGGLVQAGGSLRLSCAASGIIFRGTTMGWFRQAPGKQRESVASISPLGTTSYSGSVEGRFTVSRDNAKNTLFLQMNSLKSEDTAVYYCNAIQVTNVGPRVYWGQGTQVTVSS

SEQ ID NO: 994 - protein, 124 aa, synthetic construct
  REGION 1..124: note = Description of Artificial Sequence: Synthetic polypeptide
QVQLQESGGGLVQPGGSLRLSCASSGFTLDDYTIGWFRQAPGKEREGVSCISRRDDSTYYADSVKGRFTISRDNAKNTVDLQMISLRPEDTAVYYCAATPRSYTLRCLGKFDFQGQGTQVTVSS

SEQ ID NO: 995 - protein, 121 aa, synthetic construct
  REGION 1..121: note = Description of Artificial Sequence: Synthetic polypeptide
QVQLQESGGGLVQAGGSLRLSCAASGNIVRMTNMAWYRQAPGKQREFVATISAGGSTTYVDSVKDRFTISRDNTKNTVYLQMNYLKPEDTAVYYCATGSILTNRGAIPGSWGHGTQVTVSS

SEQ ID NO: 996 - protein, 127 aa, synthetic construct
  REGION 1..127: note = Description of Artificial Sequence: Synthetic polypeptide
QVQLQESGGGLVQAGGSLRLSCAAPGFAFNDHAILWFRQAPGKEREGVSEICRDGTTYYTDSVKGRFTISSDNAKNTVYLQMNSVKTDDTAVYYCAVDRRRYYCSGNRAFSSDYYYWGQGTQVTVSS

SEQ ID NO: 997 - protein, 119 aa, synthetic construct
  REGION 1..119: note = Description of Artificial Sequence: Synthetic polypeptide
QVQLQESGGGLVQAGGSLRLSCVHSGSIFRASTMAWYRQAPGKQRELVAQIMSGGGTNYAGSVKGRFTISRDNANNTVYLQMNSLKPEDTAVYYCNAAQITSWGPKVYWGQGTQVTVSS

SEQ ID NO: 998 - protein, 122 aa, synthetic construct
  REGION 1..122: note = Description of Artificial Sequence: Synthetic polypeptide
QVQLQESGGGLVQPGGSLRLSCAASGRINSINTMGWYRQAPGNQRELVAEITRGGTTNYADSVQGRYAISRDNAKNLVYLQMNSLKPEDTDVYYCNAQTFPTFSRPTGLDYWGQGTQVTVSS

SEQ ID NO: 999 - protein, 111 aa, synthetic construct
  REGION 1..111: note = Description of Artificial Sequence: Synthetic polypeptide
EVQLVESGGGLVQPGGSLTLSCAASGFAFGNHWMYWYRQAPGRGRELVASISSGGSTNYVDSVKGRFTISRDNAKNTLYLQMNSLRAEDTAVYYCGTSDNWGQGTLVTVSS

SEQ ID NO: 1000 - protein, 119 aa, synthetic construct
  REGION 1..119: note = Description of Artificial Sequence: Synthetic polypeptide
EVQLLESGGGLVQPGGSLTLSCAASGFIFRAASMDWYRQFPGNERESIATISSGGFTNYADSVKGRFTISRDNSKNTLYLQMNSLRAEDTAVYYCGATFLRSDGHHTINGQGTLVTVSS

SEQ ID NO: 1001 - protein, 119 aa, synthetic construct
  REGION 1..119: note = Description of Artificial Sequence: Synthetic polypeptide
EVQLLESGGGLVQPGGSLTLSCAASGFIFRAASMAWYRQSPGNERELVASISSGAFTNYADSVKARFTISRDNSKNTLYLQMNSLRAEDTAVYYCGATFLRSDGHHTINGQGTLVTVSS

SEQ ID NO: 1002 - protein, 119 aa, synthetic construct
  REGION 1..119: note = Description of Artificial Sequence: Synthetic polypeptide
EVQLLESGGGLVQPGGSLTLSCAASGFIFRAASMDWYRQFPGNERESIATISSGGFTNYADSVKGRFTISRDNSKNTLYLQMNSLRAEDTAVYYCGATFLRSDGHHTIWGQGTLVTVSS

SEQ ID NO: 1003 - protein, 119 aa, synthetic construct
  REGION 1..119: note = Description of Artificial Sequence: Synthetic polypeptide
EVQLLESGGGLVQPGGSLTLSCAASGFIFRAASMAWYRQSPGNERELVASISSGAFTNYADSVKARFTISRDNSKNTLYLQMNSLRAEDTAVYYCGATFLRSDGHHTIWGQGTLVTVSS

SEQ ID NO: 1004 - protein, 111 aa, synthetic construct
  REGION 1..111: note = Description of Artificial Sequence: Synthetic polypeptide
QVQLQESGGGLVQAGGSLRLSCAASGVTFSINYIDWYRQAPGKQREWVAQITRDSNSFYADSVKGRFAISRDNAKNTVYLQMNNLKPEDTAVYYCRVLSYWGQGTQVTVSS

SEQ ID NO: 1005 - protein, 111 aa, synthetic construct
  REGION 1..111: note = Description of Artificial Sequence: Synthetic polypeptide
QVQLQESGGGLVQAGGSLRLSCEASGPTFSINYIDWYRQAPGKQREWVAQITRDSNSFYADSVKGRFAVSRDNAKNTVYLQMNSLKPEDTAVYYCRVLSYWGQGTQVTVSS

SEQ ID NO: 1006 - protein, 111 aa, synthetic construct
  REGION 1..111: note = Description of Artificial Sequence: Synthetic polypeptide
QVQLQESGGGLVQAGGSLRLSCAASGVTFSINYIDWYRQAPGKQREWVAQITRDSNSFYADSVKGRFAISRDNAKNTVYLQMNSLKPEDTAVYYCRVLSYWGQGTQVTVSS

SEQ ID NO: 1007 - protein, 111 aa, synthetic construct
  REGION 1..111: note = Description of Artificial Sequence: Synthetic polypeptide
QVQLQESGGGLVQAGGSLRLSCAASGSTFSRNYIDWYRQAPGKQREWVAQITSGGNTHYEPSLKGRFTISRDNAKNTAYLQMNSLKPEDTAVYYCRILDYWGQGTQVTVSS

SEQ ID NO: 1008 - protein, 111 aa, synthetic construct
  REGION 1..111: note = Description of Artificial Sequence: Synthetic polypeptide
QVQLQESGGGLVQAGGSLRLSCAASGVTFSASYIDWYRQAPGNEREWVAQITRGGDSFYADSVKGRFAISRDNAKNTVYLQMNSLKPEDTAVYYCRVLSYWGQGTQVTVSS

SEQ ID NO: 1009 - protein, 111 aa, synthetic construct
  REGION 1..111: note = Description of Artificial Sequence: Synthetic polypeptide
QVQLQESGGGLVQAGGSLRLSCAASGSTFNNYAMDWFRQAPGKQREWVAQITRDSSSFYADSVKGRFAISRDNAKNTVYLQMNSLKPEDTAVYYCRVLSYWGQGTQVTVSS

SEQ ID NO: 1010 - protein, 111 aa, synthetic construct
  REGION 1..111: note = Description of Artificial Sequence: Synthetic polypeptide
QVQLQESGGGLVQAGGSLRLSCAASGVTFSINYIDWYRQAPGKQREWVAQITRDSNSFYADSVKGRFAISRDNAKNTVYLQMNSLKPEDTAVYYCRLLSYWGQGTQVTVSS

SEQ ID NO: 1011 - protein, 111 aa, synthetic construct
  REGION 1..111: note = Description of Artificial Sequence: Synthetic polypeptide
QVQLQESGGGLVQAGGSLRLSCAASGVTFSINYIDWYRQAPGKQREWVAQITRDDTSFYADSVKGRFAISRDNAKNTVYLQMNNLRPEDTAVYYCRLLSFWGQGTQVTVSS

SEQ ID NO: 1012 - protein, 111 aa, synthetic construct
  REGION 1..111: note = Description of Artificial Sequence: Synthetic polypeptide
QVQLQESGGGLVQPGGSLRLSCAASGSTFGRNYIDWYRQAPGKQREWVAQITSGGNTHYEPSLKGRFTISRDNAKNTAYLQMNSLKPEDTAVYYCRILDYWGQGTQVTVSS

SEQ ID NO: 1013 - protein, 111 aa, synthetic construct
  REGION 1..111: note = Description of Artificial Sequence: Synthetic polypeptide
QVQLQESGGGLVQAGGSLRLSCKASGVTFSINYIDWYRQAPGKQREWVAQITRDGSSFYADSVKGRFAISRDNAKNTVYLQMNSLKPEDTAVYYCRILSDWGQGTQVTVSS

SEQ ID NO: 1014 - protein, 111 aa, synthetic construct
  REGION 1..111: note = Description of Artificial Sequence: Synthetic polypeptide
QVQLQESGGGLVQAGDSLRLSCAASGVTFSASYIDWYRQAPGNEREWVAQITRGGDSFYADSVKGRFAISRDNAKNTVYLQMNSLKPEDTAVYYCRVLSYWGQGTQVTVSS

SEQ ID NO: 1015 - protein, 111 aa, synthetic construct
  REGION 1..111: note = Description of Artificial Sequence: Synthetic polypeptide
QVQLQESGGGLVQPGGSLRLSCAASGVTFSINYIDWYRQAPGKQREWVAQITRDSNSFYADSVKGRFAISRENAKNTVYLQMNSLKPEDTAVYYCRVLSYWGQGTQVTVSS

SEQ ID NO: 1016 - protein, 111 aa, synthetic construct
  REGION 1..111: note = Description of Artificial Sequence: Synthetic polypeptide
QVQLQESGGGLVQAGGSLRLSCQASGVTFNINYIDWYRQAPGRQREWVAQITRDSTRFYADSVKGRFAISRDNAKNMVYLQLNSLKPEDTAVYYCRILSYWGQGTQVTVSS

SEQ ID NO: 1017 - protein, 111 aa, synthetic construct
  REGION 1..111: note = Description of Artificial Sequence: Synthetic polypeptide
QVQLQESGGGLVQPGGSLRLSCAASGFDFSISYIDWYRQAPGNEREWVAQITRGGDSFYADSVKGRFAISRDNAKNTVYLQMNSLKPEDTAVYYCRILSYWGQGTQVTVSS

SEQ ID NO: 1018 - protein, 111 aa, synthetic construct
  REGION 1..111: note = Description of Artificial Sequence: Synthetic polypeptide
QVQLQESGGGLVQAGGSLRLSCAASGSTFSRNYIDWYRQAPGKQREWVAQITSAGNTHYEPSLKGRFTISRDNAKNTAYLQMNSLKPEDTAVYYCRILDYWGQGTQVTVSS

SEQ ID NO: 1019 - protein, 111 aa, synthetic construct
  REGION 1..111: note = Description of Artificial Sequence: Synthetic polypeptide
QVQLQESGGGLVQPGGSLRLSCAASGVTFSISYIDWYRQAPGNEREWVAQITRGGDSFYADSVKGRFAISRDNAKNTVYLQMNSLKPEDTAVYYCRILSYWGQGTQVTVSS

SEQ ID NO: 1020 - protein, 111 aa, synthetic construct
  REGION 1..111: note = Description of Artificial Sequence: Synthetic polypeptide
QVQLQESGGGLVQAGGSLRLSCAASGVTFSINYIDWYRQAPGKQREWVAQITRDSNSFYADSVKGRFAVSRDNAKNTVYLQMNSLKPEDTAVYYCRVLSYWGQGTQVTVSS

SEQ ID NO: 1021 - protein, 111 aa, synthetic construct
  REGION 1..111: note = Description of Artificial Sequence: Synthetic polypeptide
QVQLQESGGGLVQPGGSLTLSCAASGSTFSRNYIDWYRQAPGKQREWVAQITSGGNTHYEPSLKGRFTISRDNAKNTAYLQMNSLKPEDTAVYYCRILDYWGQGTQVTVSS

SEQ ID NO: 1022 - protein, 111 aa, synthetic construct
  REGION 1..111: note = Description of Artificial Sequence: Synthetic polypeptide
QVQLQESGGGLVQAGGSLRLSCAASGSTFSKNYIDWYRQAPGKQREWVAQITSGGNTHYEPSLKGRFTISRDNAKNTAYLQMNSLKPEDTAVYYCRILDYWGQGTQVTVSS

SEQ ID NO: 1023 - protein, 111 aa, synthetic construct
  REGION 1..111: note = Description of Artificial Sequence: Synthetic polypeptide
QVQLQESGGGLVQAGGSLRLSCAASGSTSSRNYIDWYRQAPGKQREWVAQITSGGNTHYEPSLKGRFTISRDNAKNTAYLQMNSLKPEDTAVYYCRILDYWGQGTQVTVSS

SEQ ID NO: 1024 - protein, 111 aa, synthetic construct
  REGION 1..111: note = Description of Artificial Sequence: Synthetic polypeptide
QVQLQESGGGLVQAGGSLRLSCSASGSTFSRNYIDWYRQAPGKQREWVAQITSGGNTHYEPSLKGRFTISRDNAKNTAYLQMNSLKPEDTAVYYCRILDYWGQGTQVTVSS

SEQ ID NO: 1025 - protein, 111 aa, synthetic construct
  REGION 1..111: note = Description of Artificial Sequence: Synthetic polypeptide
QVQLQESGGGLVQPGDPLRLSCAASGSTFSRNYIDWYRQAPGKQREWVAQITSGGNTHYEPSLKGRFTISRDNAKNTAYLQMNSLKPEDTAVYYCRILDYWGQGTQVTVSS

SEQ ID NO: 1026 - protein, 125 aa, synthetic construct
  REGION 1..125: note = Description of Artificial Sequence: Synthetic polypeptide
QVQLQESGGGLVQAGGSLRLSCAVSGRTFSGFGTGWFRQAPGKEREFVAAISWAGGRTHYEDSVKGRFTIHRDNAKNTVYLQMNSLKPEDTAVYYCAAQVSRAYDGIWYSGGDYWGQGTQVTVSS

SEQ ID NO: 1027 - protein, 125 aa, synthetic construct
  REGION 1..125: note = Description of Artificial Sequence: Synthetic polypeptide
QVQLQESGGGLVQAGGSLRLSCAVSGRTFSGFGTGWFRQAPGKEREFVAAISWDGGRTHYADFVKGRFTISRDNAKNTVYLQMNSLKPEDTAVYYCAAQVARAYDSKWYSGGDYWGQGTQVTVSS

SEQ ID NO: 1028 - protein, 125 aa, synthetic construct
  REGION 1..125: note = Description of Artificial Sequence: Synthetic polypeptide
QVQLQESGGGLVQAGGSLRLSCAVSGRTFSGFGTGWFRQAPGKEREFVAAISWVGGRTHYADSVKGRFTISRDNAKNTVYLQMNSLKPEDTAVYYCAAQVARAYDGNWYSGGDYWGQGTQVTVSS

SEQ ID NO: 1029 - protein, 125 aa, synthetic construct
  REGION 1..125: note = Description of Artificial Sequence: Synthetic polypeptide
QVQLQESGGGLVQAGGSLRLSCAVSGRTFSGFGTGWFRQAPGKEREFVAAISWSGGRTHYADSVKGRFTISRDNAKNTVYLQMNSLKPEDTAVYYCAGQVARAYDGNWYSRGDYWGQGTQVTVSS

SEQ ID NO: 1030 - protein, 125 aa, synthetic construct
  REGION 1..125: note = Description of Artificial Sequence: Synthetic polypeptide
QVQLQESGGGSVQAGGSLRLSCAFSGRTFSGFGTGWFRQAPEKEREFVAAISWDGGRTHYADSVKGRFTISRDNAKNTVYLQMDSLKPEDTAIYYCAAQVSRAYDGRWYSAVDYWGRGTQVTVSS

SEQ ID NO: 1031 - protein, 125 aa, synthetic construct
  REGION 1..125: note = Description of Artificial Sequence: Synthetic polypeptide
QVQLQESGGGLVQAGGSLRLSCAVSGRTFSGFGTGWFRQAPGKEREFVAAISWSGGTTHYADSVKGRFTISRDNAKNTVYLQMNSLKPEDTAVYYCAGQVARAYDSSWYSRGDYWGQGTQVTVSS

SEQ ID NO: 1032 - protein, 125 aa, synthetic construct
  REGION 1..125: note = Description of Artificial Sequence: Synthetic polypeptide
QVQLQESGGGLVQAGGSLGLSCAVSGRTFSGFGTGWFRQPPEKEREFVAAISWDGGRTHYADSVKGRFTISRDNAKNTVFLQMNSLKPEDTAVYYCAAQVARAYDSRWYSGGDYWGQGTQVTVSS

SEQ ID NO: 1033 - protein, 128 aa, synthetic construct
  REGION 1..128: note = Description of Artificial Sequence: Synthetic polypeptide
QVQLQESGGGLVQAGGSLRLSCAVSGRTFSGFGTGWFRQAPGKEREFVAAISWSGGTTHYADSVKGRFTISRDNAKNTVSLVYLQMNSLKPDDTAVYYCAGQVARAYDSSWYSRGDYLGQGTQVTVSS

SEQ ID NO: 1034 - protein, 125 aa, synthetic construct
  REGION 1..125: note = Description of Artificial Sequence: Synthetic polypeptide
QVQLQESGGGLVQAGGSLRLSCAVSGRTFSGFGTGWFRQAPGKEREFVAAISWDGGRTHYADSVKGRFTISRDNAANTVYLQMNSLKPEDTAVYYCAGQVSRAYDSMWYGRDDYWGQGTQVTVSS

SEQ ID NO: 1035 - protein, 128 aa, synthetic construct
  REGION 1..128: note = Description of Artificial Sequence: Synthetic polypeptide
QVQLQESGGGLVQAGGSLRLSCAVSGRTFSGFGTGWFRQAPGKEREFVAAISWSGGTTHYADSVKGRFTISRDNAKNTVNLVYLQMNDLRPEDTAVYYCAGQVARAYDSNWYSRGDYWGQGTQVTVSS

SEQ ID NO: 1036 - protein, 125 aa, synthetic construct
  REGION 1..125: note = Description of Artificial Sequence: Synthetic polypeptide
QVQLQESGGGLVQAGGSLRLSCAVSGRTFSGFGTGWFRQAPGKEREFVAAISWSGGTTHYADSVKGRFTISRDNAENTVYLEMNSLKPEDTAVYICAGQVSRAYDSNWYSRDDYWGQGTQVTVSS

SEQ ID NO: 1037 - protein, 125 aa, synthetic construct
  REGION 1..125: note = Description of Artificial Sequence: Synthetic polypeptide
QVQLQESGGGLVQAGGSLRLSCAVSGRTFSGFGTGWFRQAPEKEREFVAAISWDGGRTHYADSVKGRFTISRDNAKNTVYLQMNSLKPEDTAIYYCAGQVARAYDTRWYSRGDYWGQGTQVTVSS

SEQ ID NO: 1038 - protein, 125 aa, synthetic construct
  REGION 1..125: note = Description of Artificial Sequence: Synthetic polypeptide
QVQLQESGGGLVQAGGSLRLSCAVSGRTFSGFGTGWFRQAPGKEREFVAAISWDGGRTHYADFVKGRFTISRDNAKNTVYLQMNSLKPEDTAVYYCAAQVARAYDSRWYSGGDYWGQGTQVTVSS

SEQ ID NO: 1039 - protein, 125 aa, synthetic construct
  REGION 1..125: note = Description of Artificial Sequence: Synthetic polypeptide
QVQLQESGGGLVQAGGSLRLSCAVSGRTFSGFGTGWFRQAPGKEREFVAAVSWSGGTTEIADSVKGRFTISRDNAKNTVYLQMSSLKPGDTAVYYCAGQVARAYDSRWYSRGDYWGQGTQVTVSS

SEQ ID NO: 1040 - protein, 128 aa, synthetic construct
  REGION 1..128: note = Description of Artificial Sequence: Synthetic polypeptide
QVQLQESGGGLVQAGDSLRLSCAVSGRTFSGFGTGWFRQAPGKEREFVAAVSQSGGTTHYADSVKGRFTISRDNAKNTETLVYLQMNSLKPEDTAVYYCAGQVARAYDSSWYARGDYWGQGTQVTVSS

SEQ ID NO: 1041 - protein, 128 aa, synthetic construct
  REGION 1..128: note = Description of Artificial Sequence: Synthetic polypeptide
QVQLQESGGGLVQAGGSLRLSCAVSGRTFSGFGTGWFRQAPGKEREFVAAISWSGGTTHYADSVKGRFTISRDNAKNTVNLVYLQMNSLRPEDTAVYYCAGQVARAYDSNWYSRGDYWGQGTQVTVSS

SEQ ID NO: 1042 - protein, 125 aa, synthetic construct
  REGION 1..125: note = Description of Artificial Sequence: Synthetic polypeptide
QVQLQESGGGLVQAGGSLRLSCRFSGRTFSGFGTGWFRQAPGKEREFVAAISWAGGRTHYEDSVKGRFTISRDNAKNTVYLQMNSLKPEDTAVYYCAVQVSRAYDGIWYSGGDYWGQGTQVTVSS

SEQ ID NO: 1043 - protein, 127 aa, synthetic construct
  REGION 1..127: note = Description of Artificial Sequence: Synthetic polypeptide
QVQLQESGGGLVQAGGSLMVSCAASGGTWSSYATGWFRQVPGKERKLIAGISRSGGRTYYAESVKGRFTISRDNAKNTVYLQMNTLKPDDTAVYYCAAARYFTSSVVYTSGNDYDYWGQGTQVTVSS

SEQ ID NO: 1044 - protein, 127 aa, synthetic construct
  REGION 1..127: note = Description of Artificial Sequence: Synthetic polypeptide
QVQLQESGGGLVQAGGSLMVSCAASGGTWSSYATGWFRQVPGKERELIAGISRSGGRTYYAESVKGRFTISRDNAKNTVYLQMNTLKPDDTAVYYCAAARYFTSSVVYTSGNDYDYWGQGTQVTVSS

SEQ ID NO: 1045 - protein, 126 aa, synthetic construct
  REGION 1..126: note = Description of Artificial Sequence: Synthetic polypeptide
QVQLQESGGGLVQPGGSLRLSCAASGGTFSSYATGWFRQVPGKEREFIAGISRNSGRTYAESVKGRFTISRDNAKNTVYLQMNTLRPDDTAVYYCAAARYFTRDAIYTSGDDYDYWGQGTQVTASS

SEQ ID NO: 1046 - protein, 127 aa, synthetic construct
  REGION 1..127: note = Description of Artificial Sequence: Synthetic polypeptide
QVQLQESGGGLVQVGGSLMVSCAASGGTFSSYATGWFRQVPGKEREFIAGVSRNSGRTYYAESVKGRFTISRDNAKNTVYLQMNTLKPDDTGVYYCAAARYFTRDAVYTSGDDYDYWGQGTQVTVSS

SEQ ID NO: 1047 - protein, 127 aa, synthetic construct
  REGION 1..127: note = Description of Artificial Sequence: Synthetic polypeptide
QVQLQESGGGLVQLGDSLMVSCAASGGTFSSYATGWFRQVPGREREFIAGISRSGGRTYYAESVKGRFTISRDNAKNTVYLQMNTLKPDDTAVYYCAAARYFTTSVVYTSGDDYDYWGQGTQVTVSS

SEQ ID NO: 1048 - protein, 127 aa, synthetic construct
  REGION 1..127: note = Description of Artificial Sequence: Synthetic polypeptide
QVQLQESGGGLVQLGDSLMVSCAASGGTFSSYATGWFRQVPGKEREFIAGISRSGGRTYYAESVKGRFTISRDNAKNTVYLQMNTLKPDDTAVYYCAAARYFTTSVVYTSGDDYDYWGQGTQVTVSS

SEQ ID NO: 1049 - protein, 127 aa, synthetic construct
  REGION 1..127: note = Description of Artificial Sequence: Synthetic polypeptide
QVQLQESGGGLVQAGGSLMVSCAASGGTWSSYATGWFRQVPGKERELIAGISRSGGRTYYAESVKGRFTISRDNAKNTVYLQMNTLKSDDTAVYYCAAARYFTSSVVYTSGNDYDYWGQGTQVTVSS

SEQ ID NO: 1050 - protein, 127 aa, synthetic construct
  REGION 1..127: note = Description of Artificial Sequence: Synthetic polypeptide
QVQLQESGGGLVQVGGSLMVSCAASGGTFSSYATGWFRQVPGKEREFIAGISRNSGRTYYAESVKGRFTISRDNAKNTVYLQMNTLKPDDTAVYYCAAARYFTRDAVYTSGDDYDYWGQGTQVTVSS

SEQ ID NO: 1051 - protein, 127 aa, synthetic construct
  REGION 1..127: note = Description of Artificial Sequence: Synthetic polypeptide
QVQLQESGGGLVQVGGSLMVSCAASGGTFSSYATGWFRQVPGKEREFIAGISRNSGRTYYAESVKGRFTISRDNAKNTVYLQMNTLKPDDTAVYYCAAARYFTRDVVYTSGDDYDYWGQGTQVTVSS

SEQ ID NO: 1052 - protein, 127 aa, synthetic construct
  REGION 1..127: note = Description of Artificial Sequence: Synthetic polypeptide
QVQLQESGGGLVQAGGSLMVSCAASGGTFSSYATGWFRQVPGKEREFIAGISRSGGRTYYAESVKGRFTISRDNAKNTVYLQMNTLKPDDTAVYYCAAARYFTTSVVYTSGDDYDYWGQGTQVTVSS

SEQ ID NO: 1053 - protein, 125 aa, synthetic construct
  REGION 1..125: note = Description of Artificial Sequence: Synthetic polypeptide
QVQLQESGGGLVQAGGSLRLSCAASGRTFSSYAMGWFRQAPGKEREFVAAISWSGSNTYYADSVKGRFTISRDNAKNTVYLQMDSLKPEDTAVYYCAAGGSTRVVVTTTPVVKYWGQGTQVTVSS

SEQ ID NO: 1054 - protein, 125 aa, synthetic construct
  REGION 1..125: note = Description of Artificial Sequence: Synthetic polypeptide
QVQLQESGGGLVQAGGSLRLSCAASGRTFSSYAMGWFRQAPGMEREFVAAISWSGYSTYYADSVKGRFTISRDDAKNTVYLQMDSLKPEDTAVYYCAAGGSTRVVVTTTPVVKYWGQGTQVTVSS

SEQ ID NO: 1055 - protein, 125 aa, synthetic construct
  REGION 1..125: note = Description of Artificial Sequence: Synthetic polypeptide
QVQLQESGGGLVQAGGSLRLSCAASGRTFSSYALGWFRQAPGKEREFVAAISWSGGNTYYADSVKGRFTISRDDAKNTVYLQMDSLKPEDTAVYYCAAGGSTRVVVTTTPVVKYWGQGTQVTVSS

SEQ ID NO: 1056 - protein, 125 aa, synthetic construct
  REGION 1..125: note = Description of Artificial Sequence: Synthetic polypeptide
QVQLQESGGGLVQAGGSLRLSCAASERTFSSYTMGWFRQAPGKEREFVAAMSWSGGSTYYADSVKGRFTISRDNAKNTVYLQMDSLKPEDTAVYYCAAGGSTRVVVTTTPVVKYWGQGTQVTVSS

SEQ ID NO: 1057 - protein, 125 aa, synthetic construct
  REGION 1..125: note = Description of Artificial Sequence: Synthetic polypeptide
QVQLQESGGGLVQAGGSLRLSCAASERTFSSYAMGWFRQAPGKEREFVAAISWSGGSTYYADSVKGRFTISRDNAKNTVYLQMDSLKPEDTAVYYCAAGGSTRVVVTTTPIVKYWGQGTQVTVSS

SEQ ID NO: 1058 - protein, 125 aa, synthetic construct
  REGION 1..125: note = Description of Artificial Sequence: Synthetic polypeptide
QVQLQESGGGWVQAGGSLRLSCAASGRTFSSYAMGWFRQAPGKEREFVAAISWSGSSTYYADSVKGRFTISRDNAKNTVYLLMDSLKPEDTAVYYCAAGGSTRVVVTTTPVVKYWGQGTQVTVSS

SEQ ID NO: 1059 - protein, 121 aa, synthetic construct
  REGION 1..121: note = Description of Artificial Sequence: Synthetic polypeptide
QVQLQESGGGLVQAGGSLRLSCAASGRTFSTLTVAWFRQAPGKEREFVVASIPSGSNTGYAESVKGRFTISRDIAKNTVYLQMNSLKPEDTAMYFCAARIYFGSSRGYDYWGQGTQVTVSS

SEQ ID NO: 1060 - protein, 121 aa, synthetic construct
  REGION 1..121: note = Description of Artificial Sequence: Synthetic polypeptide
QVQLQESGGGLVQAGGSLRLSCAASGRTFTTYTVAWFRQAPGKEREFLVASIPTGSNTAYAESVKGRFTISRGNAKNTVYLQMNSLKPEDTAMYYCAARTYFGSSRGYDYWGQGTQVTVSS

SEQ ID NO: 1061 - protein, 125 aa, synthetic construct
  REGION 1..125: note = Description of Artificial Sequence: Synthetic polypeptide
QVQLQESGGGLVQAGDSLRLSCATSGRTFNLYRVGWFRQAPGKEREFVARITWSADITQYADSVKGRFTISRDNAKNTVYLQMNSLKPEDTAIYYCATTLRKSSGIYHVDDYDDWGQGTQVTVSS

SEQ ID NO: 1062 - protein, 125 aa, synthetic construct
  REGION 1..125: note = Description of Artificial Sequence: Synthetic polypeptide
QVQLQESGGGLVQAGGSLRLSCATSGRTFNLYRVGWFRQAPGKEREFVARITWSADITQYTDSVKGRFTISRDNAKNTVYLQMNSLKPEDTAIYYCATTLRKSSGIYHTDDYDYWGQGTQVTVSS

SEQ ID NO: 1063 - protein, 122 aa, synthetic construct
  REGION 1..122: note = Description of Artificial Sequence: Synthetic polypeptide
QVQLQESGGGLVQPGGSLRLSCAASGFTFSDYAMSWVRQAPGKGLEWVSGISSGGYKIGYTDSTKGRFTISRDNAKNTLYLQMNSLTAEDTAVYYCAKGTQWSWSLRDNTSRGQGTQVTVSS

SEQ ID NO: 1064 - protein, 122 aa, synthetic construct
  REGION 1..122: note = Description of Artificial Sequence: Synthetic polypeptide
QVQLQESGGGLVQPGGSLRLSCKASGFTFSSYAMSWVRQAPGKGLEWVSGISSGGYKIGYTDSTKGRFTISRDNAKNTLYLQMNSLNAEDTAVYYCAKGTQWSWALRDSTSRGQGTQVTVSS

SEQ ID NO: 1065 - protein, 111 aa, synthetic construct
  REGION 1..111: note = Description of Artificial Sequence: Synthetic polypeptide
QVQLQESGGGLVQAGGSLTLSCTASGSTFSINHFSWYRQAPGKQRELVAFISSDGVSIDVESVKGRFTISGDNDKNTAYLQMNGLKPEDTAVYYCYYRGFWGQGTQVTVSS

SEQ ID NO: 1066 - protein, 111 aa, synthetic construct
  REGION 1..111: note = Description of Artificial Sequence: Synthetic polypeptide
QVQLQESGGGLVQPGGSLTLSCTASGSTFSINHFAWYRQAPGKQRELVAFISSDGRSTDVESVKGRFTISGDNDKNTAYLQMNGLKPEDTAVYYCYYRGSWGQGTQVTVSS

SEQ ID NO: 1067 - protein, 127 aa, synthetic construct
  REGION 1..127: note = Description of Artificial Sequence: Synthetic polypeptide
QVQLQESGGGLVQAGGSLSLSCAASEGTISHAAMGWFRQAPGKERQFVAYDTWTGGSTNYADSVKDRFTITGDHAKNTVYLQMNSLKPEDTGVYYCAVRGRYSASYTYTNPASYKYWGQGTQVTVSS

SEQ ID NO: 1068 - protein, 126 aa, synthetic construct
  REGION 1..126: note = Description of Artificial Sequence: Synthetic polypeptide
QVQLQESGGGLVQAGGSLRLSCAASGGTFSSSAMGWFRQAPGKEREFVATITQNDVPTYYTHSVKGRFTISRDNAKNTMYLQMNSLKPEDTAVYYCAQRVAQASGWRTTIKDYGYWGQGTQVTVSS

SEQ ID NO: 1069 - protein, 129 aa, synthetic construct
  REGION 1..129: note = Description of Artificial Sequence: Synthetic polypeptide
QVQLQESGGGLVQAGGSLRLSCAASGLTSSTYRMAWFRQAPGKEREFAAGISYSADSGGSTNYADSVKGRFTISRDNAKNTVYLQMSSLKPEDTAVYYCAAGRYSGTYNSPYSSSYVYWGQGTQVTVSS

SEQ ID NO: 1070 - protein, 120 aa, synthetic construct
  REGION 1..120: note = Description of Artificial Sequence: Synthetic polypeptide
QVQLQESGGGLVQTGGSLRLSCAASGSTFSRNTMGWFRQAPGKERVFVLGISWSGIRSYYLDSAKARFTISRDNAKNTVYLQMNSLRPEDTAVYYCAAQEGSSPGPYKYWGQGTQVTVSS

SEQ ID NO: 1071 - protein, 121 aa, synthetic construct
  REGION 1..121: note = Description of Artificial Sequence: Synthetic polypeptide
QVQLQESGGGVVQVGGSLRLSCAASGGTFGYYAVGWFRQAPGKEREFVAAVTWNGAYLYSDPVKGRFTISRDNAKNTVYLQMNSLKSEDTAVYYCGLDRWSAVVESTPSTRGQGTQVTVSS

SEQ ID NO: 1072 - protein, 125 aa, synthetic construct
  REGION 1..125: note = Description of Artificial Sequence: Synthetic polypeptide
QVQLQESGGGLVQAGGSLRLSCAASGGAFSSYVMGWFRQAPGKEREFVAAVISWSGRITDYADSVKGRFSISRDNAKSTVYLQMNNLKPEDTAVYYCAAKTGMYIDLRTSTFDYWGQGTQVTVSS

SEQ ID NO: 1073 - protein, 120 aa, synthetic construct
  REGION 1..120: note = Description of Artificial Sequence: Synthetic polypeptide
QVQLQESGGGSVQAGGSLRLSCTASGRTFTDYTMGWFRQAPGKEREFMLGISSNGYRRYYTGSMKDRFTISRDNVKKTVYLQMNDLKPEDTAVYYCAASEDHGAPRYDYWGQGTQVTVSS

SEQ ID NO: 1074 - protein, 125 aa, synthetic construct
  REGION 1..125: note = Description of Artificial Sequence: Synthetic polypeptide
EVQLLESGGGLVQPGGSLTLSCAASGRTFSSYAMGWFRQAPGKEREFVAAISWSGSNTYYADSVKGRFTISRDNSKNTLYLQMNSLRAEDTAVYYCAAGGSTRVVVTTTPVVKYWGQGTLVTVSS

SEQ ID NO: 1075 - protein, 125 aa, synthetic construct
  REGION 1..125: note = Description of Artificial Sequence: Synthetic polypeptide
EVQLLESGGGLVQPGGSLTLSCAASGRTFSSYAMGWFRQAPGMEREFVAAISWSGYSTYYADSVKGRFTISRDNSKNTLYLQMNSLRAEDTAVYYCAAGGSTRVVVTTTPVVKYWGQGTLVTVSS

SEQ ID NO: 1076 - protein, 111 aa, synthetic construct
  REGION 1..111: note = Description of Artificial Sequence: Synthetic polypeptide
EVQLVESGGGLVQPGGSLTLSCAASGSTFSINHFSWYRQAPGKQRELVAFISSDGVSIDVESVKGRFTISGDNSKNTAYLQMNSLRAEDTAVYYCYYRGFWGQGTLVTVSS

SEQ ID NO: 1077 - protein, 125 aa, synthetic construct
  REGION 1..125: note = Description of Artificial Sequence: Synthetic polypeptide
EVQLLESGGGLVQPGGSLTLSCAASGRTFSSYALGWFRQAPGKEREFVAAISWSGGNTYYADSVKGRFTISRDNSKNTLYLQMNSLRAEDTAVYYCAAGGSTRVVVTTTPVVKYWGQGTLVTVSS

SEQ ID NO: 1078 - protein, 125 aa, synthetic construct
  REGION 1..125: note = Description of Artificial Sequence: Synthetic polypeptide
EVQLLESGGGLVQPGGSLTLSCAASERTFSSYTMGWFRQAPGKEREFVAAMSWSGGSTYYADSVKGRFTISRDNSKNTLYLQMNSLRAEDTAVYYCAAGGSTRVVVTTTPVVKYWGQGTLVTVSS

SEQ ID NO: 1079 - protein, 125 aa, synthetic construct
  REGION 1..125: note = Description of Artificial Sequence: Synthetic polypeptide
EVQLLESGGGLVQPGGSLTLSCAASGRTFSSYAMGWFRQAPGKEREFVAAISWSGSSTYYADSVKGRFTISRDNSKNTLYLQMNSLRAEDTAVYYCAAGGSTRVVVTTTPVVKYWGQGTLVTVSS

SEQ ID NO: 1080 - protein, 10 aa, synthetic construct
  REGION 1..10: note = Description of Artificial Sequence: Synthetic peptide
GVTFSINYID

SEQ ID NO: 1081 - protein, 10 aa, synthetic construct
  REGION 1..10: note = Description of Artificial Sequence: Synthetic peptide
GPTFSINYID

SEQ ID NO: 1082 - protein, 10 aa, synthetic construct
  REGION 1..10: note = Description of Artificial Sequence: Synthetic peptide
GVTFSINYID

SEQ ID NO: 1083 - protein, 10 aa, synthetic construct
  REGION 1..10: note = Description of Artificial Sequence: Synthetic peptide
GSTFSRNYID

SEQ ID NO: 1084 - protein, 10 aa, synthetic construct
  REGION 1..10: note = Description of Artificial Sequence: Synthetic peptide
GVTFSASYID

SEQ ID NO: 1085 - protein, 10 aa, synthetic construct
  REGION 1..10: note = Description of Artificial Sequence: Synthetic peptide
GSTFNNYAMD

SEQ ID NO: 1086 - protein, 10 aa, synthetic construct
  REGION 1..10: note = Description of Artificial Sequence: Synthetic peptide
GVTFSINYID

SEQ ID NO: 1087 - protein, 10 aa, synthetic construct
  REGION 1..10: note = Description of Artificial Sequence: Synthetic peptide
GVTFSINYID

SEQ ID NO: 1088 - protein, 10 aa, synthetic construct
  REGION 1..10: note = Description of Artificial Sequence: Synthetic peptide
GSTFGRNYID

SEQ ID NO: 1089 - protein, 10 aa, synthetic construct
  REGION 1..10: note = Description of Artificial Sequence: Synthetic peptide
GVTFSINYID

SEQ ID NO: 1090 - protein, 10 aa, synthetic construct
  REGION 1..10: note = Description of Artificial Sequence: Synthetic peptide
GVTFSASYID

SEQ ID NO: 1091 - protein, 10 aa, synthetic construct
  REGION 1..10: note = Description of Artificial Sequence: Synthetic peptide
GVTFSINYID

SEQ ID NO: 1092 - protein, 10 aa, synthetic construct
  REGION 1..10: note = Description of Artificial Sequence: Synthetic peptide
GVTFNINYID

SEQ ID NO: 1093 - protein, 10 aa, synthetic construct
  REGION 1..10: note = Description of Artificial Sequence: Synthetic peptide
GFDFSISYID

SEQ ID NO: 1094 - protein, 10 aa, synthetic construct
  REGION 1..10: note = Description of Artificial Sequence: Synthetic peptide
GSTFSRNYID

SEQ ID NO: 1095 - protein, 10 aa, synthetic construct
  REGION 1..10: note = Description of Artificial Sequence: Synthetic peptide
GVTFSISYID

SEQ ID NO: 1096 - protein, 10 aa, synthetic construct
  REGION 1..10: note = Description of Artificial Sequence: Synthetic peptide
GVTFSINYID

SEQ ID NO: 1097 - protein, 10 aa, synthetic construct
  REGION 1..10: note = Description of Artificial Sequence: Synthetic peptide
GSTFSRNYID

SEQ ID NO: 1098 - protein, 10 aa, synthetic construct
  REGION 1..10: note = Description of Artificial Sequence: Synthetic peptide
GSTFSKNYID

SEQ ID NO: 1099 - protein, 10 aa, synthetic construct
  REGION 1..10: note = Description of Artificial Sequence: Synthetic peptide
GSTSSRNYID

SEQ ID NO: 1100 - protein, 10 aa, synthetic construct
  REGION 1..10: note = Description of Artificial Sequence: Synthetic peptide
GSTFSRNYID

SEQ ID NO: 1101 - protein, 10 aa, synthetic construct
  REGION 1..10: note = Description of Artificial Sequence: Synthetic peptide
GSTFSRNYID

SEQ ID NO: 1102 - protein, 10 aa, synthetic construct
  REGION 1..10: note = Description of Artificial Sequence: Synthetic peptide
GRTFSGFGTG

SEQ ID NO: 1103 - protein, 10 aa, synthetic construct
  REGION 1..10: note = Description of Artificial Sequence: Synthetic peptide
GRTFSGFGTG

SEQ ID NO: 1104 - protein, 10 aa, synthetic construct
  REGION 1..10: note = Description of Artificial Sequence: Synthetic peptide
GRTFSGFGTG

SEQ ID NO: 1105 - protein, 10 aa, synthetic construct
  REGION 1..10: note = Description of Artificial Sequence: Synthetic peptide
GRTFSGFGTG

SEQ ID NO: 1106 - protein, 10 aa, synthetic construct
  REGION 1..10: note = Description of Artificial Sequence: Synthetic peptide
GRTFSGFGTG

SEQ ID NO: 1107 - protein, 10 aa, synthetic construct
  REGION 1..10: note = Description of Artificial Sequence: Synthetic peptide
GRTFSGFGTG

SEQ ID NO: 1108 - protein, 10 aa, synthetic construct
  REGION 1..10: note = Description of Artificial Sequence: Synthetic peptide
GRTFSGFGTG

SEQ ID NO: 1109 - protein, 10 aa, synthetic construct
  REGION 1..10: note = Description of Artificial Sequence: Synthetic peptide
GRTFSGFGTG

SEQ ID NO: 1110 - protein, 10 aa, synthetic construct
  REGION 1..10: note = Description of Artificial Sequence: Synthetic peptide
GRTFSGFGTG

SEQ ID NO: 1111 - protein, 10 aa, synthetic construct
  REGION 1..10: note = Description of Artificial Sequence: Synthetic peptide
GRTFSGFGTG

SEQ ID NO: 1112 - protein, 10 aa, synthetic construct
  REGION 1..10: note = Description of Artificial Sequence: Synthetic peptide
GRTFSGFGTG

SEQ ID NO: 1113 - protein, 10 aa, synthetic construct
  REGION 1..10: note = Description of Artificial Sequence: Synthetic peptide
GRTFSGFGTG

SEQ ID NO: 1114 - protein, 10 aa, synthetic construct
  REGION 1..10: note = Description of Artificial Sequence: Synthetic peptide
GRTFSGFGTG

SEQ ID NO: 1115 - protein, 10 aa, synthetic construct
  REGION 1..10: note = Description of Artificial Sequence: Synthetic peptide
GRTFSGFGTG

SEQ ID NO: 1116 - protein, 10 aa, synthetic construct
  REGION 1..10: note = Description of Artificial Sequence: Synthetic peptide
GRTFSGFGTG

SEQ ID NO: 1117 - protein, 10 aa, synthetic construct
  REGION 1..10: note = Description of Artificial Sequence: Synthetic peptide
GRTFSGFGTG

SEQ ID NO: 1118 - protein, 10 aa, synthetic construct
  REGION 1..10: note = Description of Artificial Sequence: Synthetic peptide
GRTFSGFGTG

SEQ ID NO: 1119 - protein, 10 aa, synthetic construct
  REGION 1..10: note = Description of Artificial Sequence: Synthetic peptide
GGTWSSYATG

SEQ ID NO: 1120 - protein, 10 aa, synthetic construct
  REGION 1..10: note = Description of Artificial Sequence: Synthetic peptide
GGTWSSYATG

SEQ ID NO: 1121 - protein, 10 aa, synthetic construct
  REGION 1..10: note = Description of Artificial Sequence: Synthetic peptide
GGTFSSYATG

SEQ ID NO: 1122 - protein, 10 aa, synthetic construct
  REGION 1..10: note = Description of Artificial Sequence: Synthetic peptide
GGTFSSYATG

SEQ ID NO: 1123 - protein, 10 aa, synthetic construct
  REGION 1..10: note = Description of Artificial Sequence: Synthetic peptide
GGTFSSYATG

SEQ ID NO: 1124 - protein, 10 aa, synthetic construct
  REGION 1..10: note = Description of Artificial Sequence: Synthetic peptide
GGTFSSYATG

SEQ ID NO: 1125 - protein, 10 aa, synthetic construct
  REGION 1..10: note = Description of Artificial Sequence: Synthetic peptide
GGTWSSYATG

SEQ ID NO: 1126 - protein, 10 aa, synthetic construct
  REGION 1..10: note = Description of Artificial Sequence: Synthetic peptide
GGTFSSYATG

SEQ ID NO: 1127 - protein, 10 aa, synthetic construct
  REGION 1..10: note = Description of Artificial Sequence: Synthetic peptide
GGTFSSYATG

SEQ ID NO: 1128 - protein, 10 aa, synthetic construct
  REGION 1..10: note = Description of Artificial Sequence: Synthetic peptide
GGTFSSYATG

SEQ ID NO: 1129 - protein, 10 aa, synthetic construct
  REGION 1..10: note = Description of Artificial Sequence: Synthetic peptide
GRTFSSYAMG

SEQ ID NO: 1130 - protein, 10 aa, synthetic construct
  REGION 1..10: note = Description of Artificial Sequence: Synthetic peptide
GRTFSSYAMG

SEQ ID NO: 1131 - protein, 10 aa, synthetic construct
  REGION 1..10: note = Description of Artificial Sequence: Synthetic peptide
GRTFSSYALG

SEQ ID NO: 1132 - protein, 10 aa, synthetic construct
  REGION 1..10: note = Description of Artificial Sequence: Synthetic peptide
ERTFSSYTMG

SEQ ID NO: 1133 - protein, 10 aa, synthetic construct
  REGION 1..10: note = Description of Artificial Sequence: Synthetic peptide
ERTFSSYAMG

SEQ ID NO: 1134 - protein, 10 aa, synthetic construct
  REGION 1..10: note = Description of Artificial Sequence: Synthetic peptide
GRTFSSYAMG

SEQ ID NO: 1135 - protein, 10 aa, synthetic construct
  REGION 1..10: note = Description of Artificial Sequence: Synthetic peptide
GRTFSTLTVA

SEQ ID NO: 1136 - protein, 10 aa, synthetic construct
  REGION 1..10: note = Description of Artificial Sequence: Synthetic peptide
GRTFTTYTVA

SEQ ID NO: 1137 - protein, 10 aa, synthetic construct
  REGION 1..10: note = Description of Artificial Sequence: Synthetic peptide
GRTFNLYRVG

SEQ ID NO: 1138 - protein, 10 aa, synthetic construct
  REGION 1..10: note = Description of Artificial Sequence: Synthetic peptide
GRTFNLYRVG

SEQ ID NO: 1139 - protein, 10 aa, synthetic construct
  REGION 1..10: note = Description of Artificial Sequence: Synthetic peptide
GFTFSDYAMS

SEQ ID NO: 1140 - protein, 10 aa, synthetic construct
  REGION 1..10: note = Description of Artificial Sequence: Synthetic peptide
GFTFSSYAMS

SEQ ID NO: 1141 - protein, 10 aa, synthetic construct
  REGION 1..10: note = Description of Artificial Sequence: Synthetic peptide
GSTFSINHFS

SEQ ID NO: 1142 - protein, 10 aa, synthetic construct
  REGION 1..10: note = Description of Artificial Sequence: Synthetic peptide
GSTFSINHFA

SEQ ID NO: 1143 - protein, 10 aa, synthetic construct
  REGION 1..10: note = Description of Artificial Sequence: Synthetic peptide
EGTISHAAMG

SEQ ID NO: 1144 - protein, 10 aa, synthetic construct
  REGION 1..10: note = Description of Artificial Sequence: Synthetic peptide
GGTFSSSAMG

SEQ ID NO: 1145 - protein, 10 aa, synthetic construct
  REGION 1..10: note = Description of Artificial Sequence: Synthetic peptide
GLTSSTYRMA

SEQ ID NO: 1146 - protein, 10 aa, synthetic construct
  REGION 1..10: note = Description of Artificial Sequence: Synthetic peptide
GSTFSRNTMG

SEQ ID NO: 1147 - protein, 10 aa, synthetic construct
  REGION 1..10: note = Description of Artificial Sequence: Synthetic peptide
GGTFGYYAVG

SEQ ID NO: 1148 - protein, 10 aa, synthetic construct
  REGION 1..10: note = Description of Artificial Sequence: Synthetic peptide
GGAFSSYVMG

SEQ ID NO: 1149 - protein, 10 aa, synthetic construct
  REGION 1..10: note = Description of Artificial Sequence: Synthetic peptide
GRTFTDYTMG

SEQ ID NO: 1150 - protein, 10 aa, synthetic construct
  REGION 1..10: note = Description of Artificial Sequence: Synthetic peptide
GRTFSSYAMG

SEQ ID NO: 1151 - protein, 10 aa, synthetic construct
  REGION 1..10: note = Description of Artificial Sequence: Synthetic peptide
GRTFSSYAMG

SEQ ID NO: 1152 - protein, 10 aa, synthetic construct
  REGION 1..10: note = Description of Artificial Sequence: Synthetic peptide
GSTFSINHFS

SEQ ID NO: 1153 - protein, 10 aa, synthetic construct
  REGION 1..10: note = Description of Artificial Sequence: Synthetic peptide
GRTFSSYALG

SEQ ID NO: 1154 - protein, 10 aa, synthetic construct
  REGION 1..10: note = Description of Artificial Sequence: Synthetic peptide
ERTFSSYTMG

SEQ ID NO: 1155 - protein, 10 aa, synthetic construct
  REGION 1..10: note = Description of Artificial Sequence: Synthetic peptide
GRTFSSYAMG

SEQ ID NO: 1156 - protein, 16 aa, synthetic construct
  REGION 1..16: note = Description of Artificial Sequence: Synthetic peptide
QITRDSNSFYADSVKG

SEQ ID NO: 1157 - protein, 16 aa, synthetic construct
  REGION 1..16: note = Description of Artificial Sequence: Synthetic peptide
QITRDSNSFYADSVKG

SEQ ID NO: 1158 - protein, 16 aa, synthetic construct
  REGION 1..16: note = Description of Artificial Sequence: Synthetic peptide
QITRDSNSFYADSVKG

SEQ ID NO: 1159 - protein, 16 aa, synthetic construct
  REGION 1..16: note = Description of Artificial Sequence: Synthetic peptide
QITSGGNTHYEPSLKG

SEQ ID NO: 1160 - protein, 16 aa, synthetic construct
  REGION 1..16: note = Description of Artificial Sequence: Synthetic peptide
QITRGGDSFYADSVKG

SEQ ID NO: 1161 - protein, 16 aa, synthetic construct
  REGION 1..16: note = Description of Artificial Sequence: Synthetic peptide
QITRDSSSFYADSVKG

SEQ ID NO: 1162 - protein, 16 aa, synthetic construct
  REGION 1..16: note = Description of Artificial Sequence: Synthetic peptide
QITRDSNSFYADSVKG

SEQ ID NO: 1163 - protein, 16 aa, synthetic construct
  REGION 1..16: note = Description of Artificial Sequence: Synthetic peptide
QITRDDTSFYADSVKG

SEQ ID NO: 1164 - protein, 16 aa, synthetic construct
  REGION 1..16: note = Description of Artificial Sequence: Synthetic peptide
QITSGGNTHYEPSLKG

SEQ ID NO: 1165 - protein, 16 aa, synthetic construct
  REGION 1..16: note = Description of Artificial Sequence: Synthetic peptide
QITRDGSSFYADSVKG

SEQ ID NO: 1166 - protein, 16 aa, synthetic construct
  REGION 1..16: note = Description of Artificial Sequence: Synthetic peptide
QITRGGDSFYADSVKG

SEQ ID NO: 1167 - protein, 16 aa, synthetic construct
  REGION 1..16: note = Description of Artificial Sequence: Synthetic peptide
QITRDSNSFYADSVKG

SEQ ID NO: 1168 - protein, 16 aa, synthetic construct
  REGION 1..16: note = Description of Artificial Sequence: Synthetic peptide
QITRDSTRFYADSVKG

SEQ ID NO: 1169 - protein, 16 aa, synthetic construct
  REGION 1..16: note = Description of Artificial Sequence: Synthetic peptide
QITRGGDSFYADSVKG

SEQ ID NO: 1170 - protein, 16 aa, synthetic construct
  REGION 1..16: note = Description of Artificial Sequence: Synthetic peptide
QITSAGNTHYEPSLKG

SEQ ID NO: 1171 - protein, 16 aa, synthetic construct
  REGION 1..16: note = Description of Artificial Sequence: Synthetic peptide
QITRGGDSFYADSVKG

SEQ ID NO: 1172 - protein, 16 aa, synthetic construct
  REGION 1..16: note = Description of Artificial Sequence: Synthetic peptide
QITRDSNSFYADSVKG

SEQ ID NO: 1173 - protein, 16 aa, synthetic construct
  REGION 1..16: note = Description of Artificial Sequence: Synthetic peptide
QITSGGNTHYEPSLKG

SEQ ID NO: 1174 - protein, 16 aa, synthetic construct
  REGION 1..16: note = Description of Artificial Sequence: Synthetic peptide
QITSGGNTHYEPSLKG

SEQ ID NO: 1175 - protein, 16 aa, synthetic construct
  REGION 1..16: note = Description of Artificial Sequence: Synthetic peptide
QITSGGNTHYEPSLKG

SEQ ID NO: 1176 - protein, 16 aa, synthetic construct
  REGION 1..16: note = Description of Artificial Sequence: Synthetic peptide
QITSGGNTHYEPSLKG

SEQ ID NO: 1177 - protein, 16 aa, synthetic construct
  REGION 1..16: note = Description of Artificial Sequence: Synthetic peptide
QITSGGNTHYEPSLKG

SEQ ID NO: 1178 - protein, 17 aa, synthetic construct
  REGION 1..17: note = Description of Artificial Sequence: Synthetic peptide
AISWAGGRTHYEDSVKG

SEQ ID NO: 1179 - protein, 17 aa, synthetic construct
  REGION 1..17: note = Description of Artificial Sequence: Synthetic peptide
AISWDGGRTHYADFVKG

SEQ ID NO: 1180 - protein, 17 aa, synthetic construct
  REGION 1..17: note = Description of Artificial Sequence: Synthetic peptide
AISWVGGRTHYADSVKG

SEQ ID NO: 1181 - protein, 17 aa, synthetic construct
  REGION 1..17: note = Description of Artificial Sequence: Synthetic peptide
AISWSGGRTHYADSVKG

SEQ ID NO: 1182 - protein, 17 aa, synthetic construct
  REGION 1..17: note = Description of Artificial Sequence: Synthetic peptide
AISWDGGRTHYADSVKG

SEQ ID NO: 1183 - protein, 17 aa, synthetic construct
  REGION 1..17: note = Description of Artificial Sequence: Synthetic peptide
AISWSGGTTHYADSVKG

SEQ ID NO: 1184 - protein, 17 aa, synthetic construct
  REGION 1..17: note = Description of Artificial Sequence: Synthetic peptide
AISWDGGRTHYADSVKG

SEQ ID NO: 1185 - protein, 17 aa, synthetic construct
  REGION 1..17: note = Description of Artificial Sequence: Synthetic peptide
AISWSGGTTHYADSVKG

SEQ ID NO: 1186 - protein, 17 aa, synthetic construct
  REGION 1..17: note = Description of Artificial Sequence: Synthetic peptide
AISWDGGRTHYADSVKG

SEQ ID NO: 1187 - protein, 17 aa, synthetic construct
  REGION 1..17: note = Description of Artificial Sequence: Synthetic peptide
AISWSGGTTHYADSVKG

SEQ ID NO: 1188 - protein, 17 aa, synthetic construct
  REGION 1..17: note = Description of Artificial Sequence: Synthetic peptide
AISWSGGTTHYADSVKG

SEQ ID NO: 1189 - protein, 17 aa, synthetic construct
  REGION 1..17: note = Description of Artificial Sequence: Synthetic peptide
AISWDGGRTHYADSVKG

SEQ ID NO: 1190 - protein, 17 aa, synthetic construct
  REGION 1..17: note = Description of Artificial Sequence: Synthetic peptide
AISWDGGRTHYADFVKG

SEQ ID NO: 1191 - protein, 17 aa, synthetic construct
  REGION 1..17: note = Description of Artificial Sequence: Synthetic peptide
AVSWSGGTTEIADSVKG

SEQ ID NO: 1192 - protein, 17 aa, synthetic construct
  REGION 1..17: note = Description of Artificial Sequence: Synthetic peptide
AVSQSGGTTHYADSVKG

SEQ ID NO: 1193 - protein, 17 aa, synthetic construct
  REGION 1..17: note = Description of Artificial Sequence: Synthetic peptide
AISWSGGTTHYADSVKG

SEQ ID NO: 1194 - protein, 17 aa, synthetic construct
  REGION 1..17: note = Description of Artificial Sequence: Synthetic peptide
AISWAGGRTHYEDSVKG

SEQ ID NO: 1195 - protein, 17 aa, synthetic construct
  REGION 1..17: note = Description of Artificial Sequence: Synthetic peptide
GISRSGGRTYYAESVKG

SEQ ID NO: 1196 - protein, 17 aa, synthetic construct
  REGION 1..17: note = Description of Artificial Sequence: Synthetic peptide
GISRSGGRTYYAESVKG

SEQ ID NO: 1197 - protein, 16 aa, synthetic construct
  REGION 1..16: note = Description of Artificial Sequence: Synthetic peptide
GISRNSGRTYAESVKG

SEQ ID NO: 1198 - protein, 17 aa, synthetic construct
  REGION 1..17: note = Description of Artificial Sequence: Synthetic peptide
GVSRNSGRTYYAESVKG

SEQ ID NO: 1199 - protein, 17 aa, synthetic construct
  REGION 1..17: note = Description of Artificial Sequence: Synthetic peptide
GISRSGGRTYYAESVKG

SEQ ID NO: 1200 - protein, 17 aa, synthetic construct
  REGION 1..17: note = Description of Artificial Sequence: Synthetic peptide
GISRSGGRTYYAESVKG

SEQ ID NO: 1201 - protein, 17 aa, synthetic construct
  REGION 1..17: note = Description of Artificial Sequence: Synthetic peptide
GISRSGGRTYYAESVKG

SEQ ID NO: 1202 - protein, 17 aa, synthetic construct
  REGION 1..17: note = Description of Artificial Sequence: Synthetic peptide
GISRNSGRTYYAESVKG

SEQ ID NO: 1203 - protein, 17 aa, synthetic construct
  REGION 1..17: note = Description of Artificial Sequence: Synthetic peptide
GISRNSGRTYYAESVKG

SEQ ID NO: 1204 - protein, 17 aa, synthetic construct
  REGION 1..17: note = Description of Artificial Sequence: Synthetic peptide
GISRSGGRTYYAESVKG

SEQ ID NO: 1205 - protein, 17 aa, synthetic construct
  REGION 1..17: note = Description of Artificial Sequence: Synthetic peptide
AISWSGSNTYYADSVKG

SEQ ID NO: 1206 - protein, 17 aa, synthetic construct
  REGION 1..17: note = Description of Artificial Sequence: Synthetic peptide
AISWSGYSTYYADSVKG

SEQ ID NO: 1207 - protein, 17 aa, synthetic construct
  REGION 1..17: note = Description of Artificial Sequence: Synthetic peptide
AISWSGGNTYYADSVKG

SEQ ID NO: 1208 - protein, 17 aa, synthetic construct
  REGION 1..17: note = Description of Artificial Sequence: Synthetic peptide
AMSWSGGSTYYADSVKG

SEQ ID NO: 1209 - protein, 17 aa, synthetic construct
  REGION 1..17: note = Description of Artificial Sequence: Synthetic peptide
AISWSGGSTYYADSVKG

SEQ ID NO: 1210 - protein, 17 aa, synthetic construct
  REGION 1..17: note = Description of Artificial Sequence: Synthetic peptide
AISWSGSSTYYADSVKG

SEQ ID NO: 1211 - protein, 17 aa, synthetic construct
  REGION 1..17: note = Description of Artificial Sequence: Synthetic peptide
ASIPSGSNTGYAESVKG

SEQ ID NO: 1212 - protein, 17 aa, synthetic construct
  REGION 1..17: note = Description of Artificial Sequence: Synthetic peptide
ASIPTGSNTAYAESVKG

SEQ ID NO: 1213 - protein, 17 aa, synthetic construct
  REGION 1..17: note = Description of Artificial Sequence: Synthetic peptide
RITWSADITQYADSVKG

SEQ ID NO: 1214 - protein, 17 aa, synthetic construct
  REGION 1..17: note = Description of Artificial Sequence: Synthetic peptide
RITWSADITQYTDSVKG

SEQ ID NO: 1215 - protein, 17 aa, synthetic construct
  REGION 1..17: note = Description of Artificial Sequence: Synthetic peptide
GISSGGYKIGYTDSTKG

SEQ ID NO: 1216 - protein, 17 aa, synthetic construct
  REGION 1..17: note = Description of Artificial Sequence: Synthetic peptide
GISSGGYKIGYTDSTKG

SEQ ID NO: 1217 - protein, 16 aa, synthetic construct
  REGION 1..16: note = Description of Artificial Sequence: Synthetic peptide
FISSDGVSIDVESVKG

SEQ ID NO: 1218 - protein, 16 aa, synthetic construct
  REGION 1..16: note = Description of Artificial Sequence: Synthetic peptide
FISSDGRSTDVESVKG

SEQ ID NO: 1219 - protein, 17 aa, synthetic construct
  REGION 1..17: note = Description of Artificial Sequence: Synthetic peptide
YDTWTGGSTNYADSVKD

SEQ ID NO: 1220 - protein, 17 aa, synthetic construct
  REGION 1..17: note = Description of Artificial Sequence: Synthetic peptide
TITQNDVPTYYTHSVKG

SEQ ID NO: 1221 - protein, 21 aa, synthetic construct
  REGION 1..21: note = Description of Artificial Sequence: Synthetic peptide
AGISYSADSGGSTNYADSVKG

SEQ ID NO: 1222 - protein, 17 aa, synthetic construct
  REGION 1..17: note = Description of Artificial Sequence: Synthetic peptide
GISWSGIRSYYLDSAKA

SEQ ID NO: 1223 - protein, 16 aa, synthetic construct
  REGION 1..16: note = Description of Artificial Sequence: Synthetic peptide
AVTWNGAYLYSDPVKG

SEQ ID NO: 1224 - protein, 18 aa, synthetic construct
  REGION 1..18: note = Description of Artificial Sequence: Synthetic peptide
AVISWSGRITDYADSVKG

SEQ ID NO: 1225 - protein, 17 aa, synthetic construct
  REGION 1..17: note = Description of Artificial Sequence: Synthetic peptide
GISSNGYRRYYTGSMKD

SEQ ID NO: 1226 - protein, 16 aa, synthetic construct
  REGION 1..16: note = Description of Artificial Sequence: Synthetic peptide
ISWSGSNTYYADSVKG

SEQ ID NO: 1227 - protein, 16 aa, synthetic construct
  REGION 1..16: note = Description of Artificial Sequence: Synthetic peptide
ISWSGYSTYYADSVKG

SEQ ID NO: 1228 - protein, 15 aa, synthetic construct
  REGION 1..15: note = Description of Artificial Sequence: Synthetic peptide
ISSDGVSIDVESVKG

SEQ ID NO: 1229 - protein, 16 aa, synthetic construct
  REGION 1..16: note = Description of Artificial Sequence: Synthetic peptide
ISWSGGNTYYADSVKG

SEQ ID NO: 1230 - protein, 16 aa, synthetic construct
  REGION 1..16: note = Description of Artificial Sequence: Synthetic peptide
MSWSGGSTYYADSVKG

SEQ ID NO: 1231 - protein, 16 aa, synthetic construct
  REGION 1..16: note = Description of Artificial Sequence: Synthetic peptide
ISWSGSSTYYADSVKG

SEQ ID NO: 1232-1253 - skipped (22 entries)

SEQ ID NO: 1254 - protein, 17 aa, synthetic construct
  REGION 1..17: note = Description of Artificial Sequence: Synthetic peptide
AQVSRAYDGIWYSGGDY

SEQ ID NO: 1255 - protein, 17 aa, synthetic construct
  REGION 1..17: note = Description of Artificial Sequence: Synthetic peptide
AQVARAYDSKWYSGGDY

SEQ ID NO: 1256 - protein, 17 aa, synthetic construct
  REGION 1..17: note = Description of Artificial Sequence: Synthetic peptide
AQVARAYDGNWYSGGDY

SEQ ID NO: 1257 - protein, 17 aa, synthetic construct
  REGION 1..17: note = Description of Artificial Sequence: Synthetic peptide
GQVARAYDGNWYSRGDY

SEQ ID NO: 1258 - protein, 17 aa, synthetic construct
  REGION 1..17: note = Description of Artificial Sequence: Synthetic peptide
AQVSRAYDGRWYSAVDY

SEQ ID NO: 1259 - protein, 17 aa, synthetic construct
  REGION 1..17: note = Description of Artificial Sequence: Synthetic peptide
GQVARAYDSSWYSRGDY

SEQ ID NO: 1260 - protein, 17 aa, synthetic construct
  REGION 1..17: note = Description of Artificial Sequence: Synthetic peptide
AQVARAYDSRWYSGGDY

SEQ ID NO: 1261 - protein, 17 aa, synthetic construct
  REGION 1..17: note = Description of Artificial Sequence: Synthetic peptide
GQVARAYDSSWYSRGDY

SEQ ID NO: 1262 - protein, 17 aa, synthetic construct
  REGION 1..17: note = Description of Artificial Sequence: Synthetic peptide
GQVSRAYDSMWYGRDDY

SEQ ID NO: 1263 - protein, 17 aa, synthetic construct
  REGION 1..17: note = Description of Artificial Sequence: Synthetic peptide
GQVARAYDSNWYSRGDY

SEQ ID NO: 1264 - protein, 17 aa, synthetic construct
  REGION 1..17: note = Description of Artificial Sequence: Synthetic peptide
GQVSRAYDSNWYSRDDY

SEQ ID NO: 1265 - protein, 17 aa, synthetic construct
  REGION 1..17: note = Description of Artificial Sequence: Synthetic peptide
GQVARAYDTRWYSRGDY

SEQ ID NO: 1266 - protein, 17 aa, synthetic construct
  REGION 1..17: note = Description of Artificial Sequence: Synthetic peptide
AQVARAYDSRWYSGGDY

SEQ ID NO: 1267 - protein, 17 aa, synthetic construct
  REGION 1..17: note = Description of Artificial Sequence: Synthetic peptide
GQVARAYDSRWYSRGDY

SEQ ID NO: 1268 - protein, 17 aa, synthetic construct
  REGION 1..17: note = Description of Artificial Sequence: Synthetic peptide
GQVARAYDSSWYARGDY

SEQ ID NO: 1269 - protein, 17 aa, synthetic construct
  REGION 1..17: note = Description of Artificial Sequence: Synthetic peptide
GQVARAYDSNWYSRGDY

SEQ ID NO: 1270 - protein, 17 aa, synthetic construct
  REGION 1..17: note = Description of Artificial Sequence: Synthetic peptide
VQVSRAYDGIWYSGGDY

SEQ ID NO: 1271 - protein, 18 aa, synthetic construct
  REGION 1..18: note = Description of Artificial Sequence: Synthetic peptide
ARYFTSSVVYTSGNDYDY

SEQ ID NO: 1272 - protein, 18 aa, synthetic construct
  REGION 1..18: note = Description of Artificial Sequence: Synthetic peptide
ARYFTSSVVYTSGNDYDY

SEQ ID NO: 1273 - protein, 18 aa, synthetic construct
  REGION 1..18: note = Description of Artificial Sequence: Synthetic peptide
ARYFTRDAIYTSGDDYDY

SEQ ID NO: 1274 - protein, 18 aa, synthetic construct
  REGION 1..18: note = Description of Artificial Sequence: Synthetic peptide
ARYFTRDAVYTSGDDYDY

SEQ ID NO: 1275 - protein, 18 aa, synthetic construct
  REGION 1..18: note = Description of Artificial Sequence: Synthetic peptide
ARYFTTSVVYTSGDDYDY

SEQ ID NO: 1276 - protein, 18 aa, synthetic construct
  REGION 1..18: note = Description of Artificial Sequence: Synthetic peptide
ARYFTTSVVYTSGDDYDY

SEQ ID NO: 1277 - protein, 18 aa, synthetic construct
  REGION 1..18: note = Description of Artificial Sequence: Synthetic peptide
ARYFTSSVVYTSGNDYDY

SEQ ID NO: 1278 - protein, 18 aa, synthetic construct
  REGION 1..18: note = Description of Artificial Sequence: Synthetic peptide
ARYFTRDAVYTSGDDYDY

SEQ ID NO: 1279 - protein, 18 aa, synthetic construct
  REGION 1..18: note = Description of Artificial Sequence: Synthetic peptide
ARYFTRDVVYTSGDDYDY

SEQ ID NO: 1280 - protein, 18 aa, synthetic construct
  REGION 1..18: note = Description of Artificial Sequence: Synthetic peptide
ARYFTTSVVYTSGDDYDY

SEQ ID NO: 1281 - protein, 17 aa, synthetic construct
  REGION 1..17: note = Description of Artificial Sequence: Synthetic peptide
AGGSTRVVVTTTPVVKY

SEQ ID NO: 1282 - protein, 17 aa, synthetic construct
  REGION 1..17: note = Description of Artificial Sequence: Synthetic peptide
AGGSTRVVVTTTPVVKY

SEQ ID NO: 1283 - protein, 17 aa, synthetic construct
  REGION 1..17: note = Description of Artificial Sequence: Synthetic peptide
AGGSTRVVVTTTPVVKY

SEQ ID NO: 1284 - protein, 17 aa, synthetic construct
  REGION 1..17: note = Description of Artificial Sequence: Synthetic peptide
AGGSTRVVVTTTPVVKY

SEQ ID NO: 1285 - protein, 17 aa, synthetic construct
  REGION 1..17: note = Description of Artificial Sequence: Synthetic peptide
AGGSTRVVVTTTPIVKY

SEQ ID NO: 1286 - protein, 17 aa, synthetic construct
  REGION 1..17: note = Description of Artificial Sequence: Synthetic peptide
AGGSTRVVVTTTPVVKY

SEQ ID NO: 1287 - protein, 12 aa, synthetic construct
  REGION 1..12: note = Description of Artificial Sequence: Synthetic peptide
RIYFGSSRGYDY

SEQ ID NO: 1288 - protein, 12 aa, synthetic construct
  REGION 1..12: note = Description of Artificial Sequence: Synthetic peptide
RTYFGSSRGYDY

SEQ ID NO: 1289 - protein, 16 aa, synthetic construct
  REGION 1..16: note = Description of Artificial Sequence: Synthetic peptide
TLRKSSGIYHVDDYDD

SEQ ID NO: 1290 - protein, 16 aa, synthetic construct
  REGION 1..16: note = Description of Artificial Sequence: Synthetic peptide
TLRKSSGIYHTDDYDY

SEQ ID NO: 1291 - protein, 13 aa, synthetic construct
  REGION 1..13: note = Description of Artificial Sequence: Synthetic peptide
GTQWSWSLRDNTS

SEQ ID NO: 1292 - protein, 13 aa, synthetic construct
  REGION 1..13: note = Description of Artificial Sequence: Synthetic peptide
GTQWSWALRDSTS

SEQ ID NO: 1293-1294 - skipped (2 entries)

SEQ ID NO: 1295 - protein, 18 aa, synthetic construct
  REGION 1..18: note = Description of Artificial Sequence: Synthetic peptide
RGRYSASYTYTNPASYKY

SEQ ID NO: 1296 - protein, 17 aa, synthetic construct
  REGION 1..17: note = Description of Artificial Sequence: Synthetic peptide
RVAQASGWRTTIKDYGY

SEQ ID NO: 1297 - protein, 17 aa, synthetic construct
  REGION 1..17: note = Description of Artificial Sequence: Synthetic peptide
GRYSGTYNSPYSSSYVY

SEQ ID NO: 1298 - protein, 12 aa, synthetic construct
  REGION 1..12: note = Description of Artificial Sequence: Synthetic peptide
AQEGSSPGPYKY

SEQ ID NO: 1299 - protein, 13 aa, synthetic construct
  REGION 1..13: note = Description of Artificial Sequence: Synthetic peptide
DRWSAVVESTPST

SEQ ID NO: 1300 - protein, 16 aa, synthetic construct
  REGION 1..16: note = Description of Artificial Sequence: Synthetic peptide
AKTGMYIDLRTSTFDY

SEQ ID NO: 1301 - protein, 11 aa, synthetic construct
  REGION 1..11: note = Description of Artificial Sequence: Synthetic peptide
SEDHGAPRYDY

SEQ ID NO: 1302 - protein, 16 aa, synthetic construct
  REGION 1..16: note = Description of Artificial Sequence: Synthetic peptide
GGSTRVVVTTTPVVKY

SEQ ID NO: 1303 - protein, 16 aa, synthetic construct
  REGION 1..16: note = Description of Artificial Sequence: Synthetic peptide
GGSTRVVVTTTPVVKY

SEQ ID NO: 1304 - skipped

SEQ ID NO: 1305 - protein, 16 aa, synthetic construct
  REGION 1..16: note = Description of Artificial Sequence: Synthetic peptide
GGSTRVVVTTTPVVKY

SEQ ID NO: 1306 - protein, 16 aa, synthetic construct
  REGION 1..16: note = Description of Artificial Sequence: Synthetic peptide
GGSTRVVVTTTPVVKY

SEQ ID NO: 1307 - protein, 16 aa, synthetic construct
  REGION 1..16: note = Description of Artificial Sequence: Synthetic peptide
GGSTRVVVTTTPVVKY

SEQ ID NO: 1308 - protein, 115 aa, synthetic construct
  REGION 1..115: note = Description of Artificial Sequence: Synthetic polypeptide
QVQLQESGGGLVQAGGSLRLSCAASGSIFSIASMGWYRQAPGKQRELVAVITSFSSTNYADSVKGRFTISRDNAKNTVYLQMNSLKPEDTGVYYCNARYFERTDWGQGTQVTVSS

SEQ ID NO: 1309 - protein, 115 aa, synthetic construct
  REGION 1..115: note = Description of Artificial Sequence: Synthetic polypeptide
QVQLQESGGGLVQAGGSLRLSCAAPGSIFSIASMGWYRQAPGKQRELVAVITSFSSTNYADSVKGRFTISRDNAKNTVYLQMNSLKPEDTGVYYCNARYFERTDWGQGTQVTVSS

SEQ ID NO: 1310 - protein, 115 aa, synthetic construct
  REGION 1..115: note = Description of Artificial Sequence: Synthetic polypeptide
QVQLQESGGGLVQAGGSLRLSCAASGSIFSIASMAWYRQAPGKQRELVAAITSFSSTNYADSVKGRFTISRDNAKNTVYLQMNSLKPEDTGVYYCNARYFERTDWGQGTQVTVSS

SEQ ID NO: 1311 - protein, 115 aa, synthetic construct
  REGION 1..115: note = Description of Artificial Sequence: Synthetic polypeptide
QVQLQESGGGLVQAGGSLRLSCAASESIFSINVMAWHRQAPGKQRELVARITSGGSTNYADSVKGRFTISRDNAKNTVYLQMNSLKPEDTGVYYCGAYQGLYAYWGQGTQVTVSS

SEQ ID NO: 1312 - protein, 115 aa, synthetic construct
  REGION 1..115: note = Description of Artificial Sequence: Synthetic polypeptide
QVQLQESGGGLVQAGGSLRLSCVASGSSFSITSMAWYRQAPGKQRDLVAAITSFGSTNYADSVKDRFTISRDNAKNTVYLQMNSLKPEDTAVYYCNGRVFDHVYWGQGTQVTVSS

SEQ ID NO: 1313 - protein, 115 aa, synthetic construct
  REGION 1..115: note = Description of Artificial Sequence: Synthetic polypeptide
QVQLQESGGGLVQAGGSLKLSCAASSSIFSISSMSWYRQAPGKQRELVAAITTFDYTNYADSVKGRFTISRDNAKNMMYLQMNSLKPEDTAVYLCNARAFGRDYWGQGTQVTVSS

SEQ ID NO: 1314 - protein, 115 aa, synthetic construct
  REGION 1..115: note = Description of Artificial Sequence: Synthetic polypeptide
QVQLQESGGGLVQAGGSLKLSCAASSSIFSISSMSWYRQAPGKQRELVAAITSFGSTNYADSVKGRFTISRDNAKNMMYLQMNSLKPEDTAVYRCNARTMGRDYWGQGTQVTVSS

SEQ ID NO: 1315 - protein, 116 aa, synthetic construct
  REGION 1..116: note = Description of Artificial Sequence: Synthetic polypeptide
QVQLQESGGGLVQPGGSLRLSCAASGSTLNIKIMAWHRQAPGKQRELVATLTSGGNTNYADSVKGRFTISRDNAKNTVYLQMNSLQPEDTAVYYCGLWDGVGGAYWGRGTQVTVSS

SEQ ID NO: 1316 - protein, 116 aa, synthetic construct
  REGION 1..116: note = Description of Artificial Sequence: Synthetic polypeptide
QVQLQESGGGLVQPGGSLRISCAASGSTLNIKIMAWHRQAPGKQRELVATLTSGGNTNYADSVKGRFTISRDNAKNTVYLQMNSLQPEDTAVYYCGLWDGVGGAYWGRGTQVTVSS

SEQ ID NO: 1317 - protein, 116 aa, synthetic construct
  REGION 1..116: note = Description of Artificial Sequence: Synthetic polypeptide
QVQLQESGGGLVQAGGSLRLSCAASGSTFNIKTMAWHRQAPGNQRELVATLTSGGNTNYADSVKGRFTISRDNAKNTVYLQMNSLKPEDTAVYYCGLWNGVGGAYWGRGTQVTVSS

SEQ ID NO: 1318 - protein, 115 aa, synthetic construct
  REGION 1..115: note = Description of Artificial Sequence: Synthetic polypeptide
QVQLQDGGGLVQPGGSLRLSCAASGSTFNIKLMAWHRQAPGNQRELVATLTSGGNTNYADSVKGRFTISRDNASNIVYLQMNSLKPEDTAVYYCGLWDGVGGAYWGRGTQVTVSS

SEQ ID NO: 1319 - protein, 116 aa, synthetic construct
  REGION 1..116: note = Description of Artificial Sequence: Synthetic polypeptide
QVQLQESGGGLVQAGGSLRLSCAASGSTFNFKIMAWHRQAPGKQRELVASLTSEGLTNYRDSVKGRFTISRDNAKNTVYLQMNNLKPEDTAVYYCGLWDGVGGAYWGRGTQVTVSS

SEQ ID NO: 1320 - protein, 114 aa, synthetic construct
  REGION 1..114: note = Description of Artificial Sequence: Synthetic polypeptide
QVQLQESGGGLVQPGGSLRLSCAASGFMFSSYSMSWYRQAPGKQRELVAAITTWGSTNYADSVKGRFTISRDNAKNTVWLQMNSLEPEDTAVYFCNARSWNNYWGQGTQVTVSS

SEQ ID NO: 1321 - protein, 114 aa, synthetic construct
  REGION 1..114: note = Description of Artificial Sequence: Synthetic polypeptide
QVQLQESGGGLVQVGGSLRLSCAASGFMFSSYSMSWYRQAPGKQRELVAAITSYGSTNYADSVKGRFTISRDNAKNTVWLQMNSLKPEDTAVYFCNARSWNNYWGQGTQVTVSS

SEQ ID NO: 1322 - protein, 114 aa, synthetic construct
  REGION 1..114: note = Description of Artificial Sequence: Synthetic polypeptide
QVQLQESGGGLVQPGGSLRLSCAASGFTFSSHSMSWYRQAPGKQRELVAAITTYGSTNYIDSVKGRFTISRDNTKNTVYLQMNSLKPEDTAVYFCNARSWNNYWGQGTQVTVSS

SEQ ID NO: 1323 - protein, 117 aa, synthetic construct
  REGION 1..117: note = Description of Artificial Sequence: Synthetic polypeptide
QVQLQESGGGLVQAGGSLRLSCVASGSSFSHNTMGWYRQAPGKQRDLVARITTFGTTNYADSVKGRFTISRDNAKNTVYLQMNSLKPEDTAVYYCNGESFGRIWYNWGQGTQVTVSS

SEQ ID NO: 1324 - protein, 116 aa, synthetic construct
  REGION 1..116: note = Description of Artificial Sequence: Synthetic polypeptide
QVQLQESGGGLVQAGASLRLTCTASGGRFSYATMGWSRQAPGKQREMVARITSSGFSTNYADSVKGRFTISRDNAKNAVYLQMDSLKPEDTAVYYCNAQHFGTDSWGQGTQVTVSS

SEQ ID NO: 1325 - protein, 116 aa, synthetic construct
  REGION 1..116: note = Description of Artificial Sequence: Synthetic polypeptide
QVQLQESGGGLVQAGASLRLTCTASGSRFSYATMGWSRQAPGKQRELVARITSSGFSTNYADSVKGRFTISRDNAKNAVYLQMDSLKPEDTAVYYCNAQQFGTDSWGQGTQVTVSS

SEQ ID NO: 1326 - protein, 117 aa, synthetic construct
  REGION 1..117: note = Description of Artificial Sequence: Synthetic polypeptide
QVQLQESGGGLVQAGGSLRLSCAASGSTFTSNVMGWHRQAPGKQRELVANMHSGGSTNYADSVKGRFTISRDNAKNIVYLQMNNLKIEDTAVYYCRWYGIQRAEGYWGQGTQVTVSS

SEQ ID NO: 1327 - protein, 117 aa, synthetic construct
  REGION 1..117: note = Description of Artificial Sequence: Synthetic polypeptide
QVQLQESGGGLVVAGGSLRLSCAASGSSVSFLSMAWYRQAPGKKRELVAGISVDGSTNYADSVKGRFTVSRDNAKNTVYLQMNSLQPEDTAVYYCYAYRWVGRDTYWGQGTQVTVSS

SEQ ID NO: 1328 - protein, 117 aa, synthetic construct
  REGION 1..117: note = Description of Artificial Sequence: Synthetic polypeptide
QVQLQESGGGLVVAGGSLRLSCAASGSSVSFLSMAWYRQAPGKKRELVAGISVDGSTNYADSVKGRFTISRDNAKNTVYLQMNSLQPEDTAVYYCYAYRWVGRDTYWGQGTQVTVSS

SEQ ID NO: 1329 - protein, 117 aa, synthetic construct
  REGION 1..117: note = Description of Artificial Sequence: Synthetic polypeptide
QVQLQESGGGLVVSGGSLRLSCAASGSSVSFLSMAWYRQAPGKKRELVAGISVDGSTNYADSVKGRFTISRDNAKNTVYLQMNSLQPEDTAAYYCYAYRWVGRDTYWGQGTQVTVSS

SEQ ID NO: 1330 - protein, 117 aa, synthetic construct
  REGION 1..117: note = Description of Artificial Sequence: Synthetic polypeptide
QVQLQESGGGLVVAGGSLRLSCAASGSSVSFLSMAWYRQAPGKKRELVAGISVDGSTNYADSVKGRFTISRDNAENTVYLQMNSLQPEDTAVYYCYAYRWEGRDTYWGQGTQVTVSS

SEQ ID NO: 1331 - protein, 117 aa, synthetic construct
  REGION 1..117: note = Description of Artificial Sequence: Synthetic polypeptide
QVQLQESGGGLVVAGGSLRLSCAASGSSVSFLSMAWYRQAPGKKRELVAGISVDGSTNYADSVKGRFTISRDNAENTVYLQMNSLQPEDTAVYYCYAYRWEGRNTYWGQGTQVTVSS

SEQ ID NO: 1332 - protein, 117 aa, synthetic construct
  REGION 1..117: note = Description of Artificial Sequence: Synthetic polypeptide
QVQLQESGGGLVQPGGSLRLSCAASGSSVSFLSMAWYRQAPGKKRELVAGISTDGSTNYVDSVKGRFTISRDNAKNTVYLQMNSLQPEDTAVYYCYAYRWVGRYTYWGQGTQVTVSS

SEQ ID NO: 1333 - protein, 117 aa, synthetic construct
  REGION 1..117: note = Description of Artificial Sequence: Synthetic polypeptide
QVQLQESGGGLVVAGGSLRLSCAASGSSVSFLSMAWYRQAPGKKRELVAGISTDGTTNYVDSVKDRFTISRDNAKNTVYLQMNSLQPEDTAAYYCYAYRWVGRDTYWGQGTQVTVSS

SEQ ID NO: 1334 - protein, 117 aa, synthetic construct
  REGION 1..117: note = Description of Artificial Sequence: Synthetic polypeptide
QVQLQESGGGLVVAGGSLRLSCAASGSSVSFLSIAWYRQAPGKKRELVAGISTDGTTNYVDSVKDRFTISRDNAKNTVYLQMNSLQPEDTAAYYCYAYRWVGRDTYWGQGTQVTVSS

SEQ ID NO: 1335 - protein, 117 aa, synthetic construct
  REGION 1..117: note = Description of Artificial Sequence: Synthetic polypeptide
QVQLQESGGGLVQAGGSLTLSCAASGSSVSFLSMAWYRQAPGKKRELVAGISTDGTTNYVDSVKDRFTISRDNAKNTVYLQMNSLQPEDTAAYYCYAYRWVGRDTYWGQGTQVTVSS

SEQ ID NO: 1336 - protein, 117 aa, synthetic construct
  REGION 1..117: note = Description of Artificial Sequence: Synthetic polypeptide
QVQLQESGGGLVQAGGSLRLSCAASGSSVSFLSMAWYRQAPGKKRELVAGISTDGSTNYADSVKGRFTISEGNAKNTVDLQMNSLQPEDTAVYYCYAYRWVDRYTYWGQGTQVTVSS

SEQ ID NO: 1337 - protein, 117 aa, synthetic construct
  REGION 1..117: note = Description of Artificial Sequence: Synthetic polypeptide
QVQLQESGGGLVVAGGSLRLSCAASGSSVSFLSMAWYRQAPGKKRELVAGISTDGSTNYADSVKGRFTISEDNAKNTVDLQMNSLQPEDTAVYYCYAYRWIDRYTYWGQGTQVTVSS

SEQ ID NO: 1338 - protein, 117 aa, synthetic construct
  REGION 1..117: note = Description of Artificial Sequence: Synthetic polypeptide
QVQLQESGGGLVQPGGSLRLSCAASGSSVSFLSMAWYRQAPGKKRELVAGISTDGSTNYADSVKGRFTISEDNAKNTVDLQMNSLQPEDTAVYYCYAYRWVDRYTYWGQGTQVTVSS

SEQ ID NO: 1339 - protein, 117 aa, synthetic construct
  REGION 1..117: note = Description of Artificial Sequence: Synthetic polypeptide
QVQLQESGGGLVVAGGSLRLSCAASGSSVSFLSMAWYRQAPGKKRELVAGISSDGSTNYVDSVKGRFTISRDNAKNIVFLQMNSLQPQDTAVYYCYAYRWVGRDTYWGQGTQVTVSS

SEQ ID NO: 1340 - protein, 117 aa, synthetic construct
  REGION 1..117: note = Description of Artificial Sequence: Synthetic polypeptide
QVQLQESGGGLVVAGGSLRLSCAASGSSVSFLSMAWYRQAPGKKRELVAGISADGSTDYIDSVKGRFTISRDSANNTMYLQMNSLQPEDTAVYYCYAYRWTTRYTYWGQGTQVTVSS

SEQ ID NO: 1341 - protein, 117 aa, synthetic construct
  REGION 1..117: note = Description of Artificial Sequence: Synthetic polypeptide
QVQLQESGGGLVQPGGSLRLSCAASGFTLDYYAIGWYRQAPGKKRELVAGISSDGSTHYVDSVKGRFAISRDNAENTVYLQMNDLQPDDTAVYYCYAYRWVGGYTYWGQGTQVTVSS

SEQ ID NO: 1342 - protein, 119 aa, synthetic construct
  REGION 1..119: note = Description of Artificial Sequence: Synthetic polypeptide
QVQLQESGGGLVQAGGSLRLSCVASGSTSSINAMGWYRRAPGKQRELVAGISSDGSKNYADSVKGRFTISRDNAKNTVYLQMNSLKPEDTAVYYCYYFRTVAASSMQYWGQGTQVTVSS

SEQ ID NO: 1343 - protein, 119 aa, synthetic construct
  REGION 1..119: note = Description of Artificial Sequence: Synthetic polypeptide
QVQLQESGGGLVQAGGSLRLSCVASGSTSSINAMGWYRRAPGKQRELVAGISSDGSKVYADSVKGRFTISRDNAKNTVYLQMNSLKPEDTAVFYCYYFRTVSGSSMRYWGQGTQVTVSS

SEQ ID NO: 1344 - protein, 118 aa, synthetic construct
  REGION 1..118: note = Description of Artificial Sequence: Synthetic polypeptide
QVQLQESGGGLVQAGGSLRLSCAASGITSSVYSMGWYRQAPGKQRELVAGSSSDGSTHYVDSVRGRFTISRDNAKNTVYLQMSSLKPEDTAVYYCYANRGFAGAPSYWGQGTQVTVSS

SEQ ID NO: 1345 - protein, 114 aa, synthetic construct
  REGION 1..114: note = Description of Artificial Sequence: Synthetic polypeptide
QVQLQESGGGLVQAGGSLRLSCAASGRTSMFNSMGWHRQAPGKQRELVAIIRSGGSSNYADTVKGRFTISRDNTKNTVYLQMNDLKPEDTAVYYCFYYFQSSYWGQGTQVTVSS

SEQ ID NO: 1346 - protein, 114 aa, synthetic construct
  REGION 1..114: note = Description of Artificial Sequence: Synthetic polypeptide
QVQLQESGGGLVQAGGSLRLSCAASGRTSMVNSMGWHRQAPGKQRELVALITSGGSSNYADTVKGRFTISRDNTKNTVYLQMNDLKPEDTAVYYCFYYFQSSYWGQGTQVTVSS

SEQ ID NO: 1347 - protein, 114 aa, synthetic construct
  REGION 1..114: note = Description of Artificial Sequence: Synthetic polypeptide
QVQLQESGGGLVQAGGSLRLSCAASGSVSMFNSMGWHRQPPGKQRELVAIITSGGSSNYADTVKGRFTISRDNTKNTVYLQMNDLKPEDTAVYYCFYYFQSSYWGQGTQVTVSS

SEQ ID NO: 1348 - protein, 119 aa, synthetic construct
  REGION 1..119: note = Description of Artificial Sequence: Synthetic polypeptide
QVQLQESGGGLVQAGGSLRLSCTASGSIFSIAVMGWYRQVPGKRREWVATIFDGSYTNYADSVKGRFTISRDNARNKVYLQMNNLKPEDTAVYYCQTHWTQGSVPKESWGQGTQVTVSS

SEQ ID NO: 1349 - protein, 115 aa, synthetic construct
  REGION 1..115: note = Description of Artificial Sequence: Synthetic polypeptide
QVQLQESGGGLVQAGGSLRLSCVASSGIFSDMSMVWYRQAPGKQRELVASITTFGSTNYADPVKGRFTISRDNAKNTVYLQMNSLKPEDTAVYYCSGRSYSSDYWGRGTQVTVSS

SEQ ID NO: 1350 - protein, 115 aa, synthetic construct
  REGION 1..115: note = Description of Artificial Sequence: Synthetic polypeptide
QVQLQESGGGLVQAGGSLRLSCVASGSISSIIVMGWSRQAPGKQRESVATITRDGTRNYADSLKGRFTISRDNAKNTSYLQINSLKPEDTAVYSCYARYGDINYWGKGTQVTVSS

SEQ ID NO: 1351 - protein, 115 aa, synthetic construct
  REGION 1..115: note = Description of Artificial Sequence: Synthetic polypeptide
QVQLQESGGGLVQAGGSLRLSCVASGSISSIIVMGWSRQAPGKQRESLATISRGGTRTYADSVKGRFTISRDNAKNTSYLQMNSLKPEDTAVYSCYARYGDINYWGKGTQVTVSS

SEQ ID NO: 1352 - protein, 114 aa, synthetic construct
  REGION 1..114: note = Description of Artificial Sequence: Synthetic polypeptide
QVQLQESGGGLVQAGGSLRLSCVASGSIFTTNSMGWHRQGPGKQRELVALIGSAGSTKYADSVKGRFTISRDNAKNTVSLQMDSLKPEDTAVYYCFYYDSRSYWGQGTQVTVSS

SEQ ID NO: 1353 - protein, 114 aa, synthetic construct
  REGION 1..114: note = Description of Artificial Sequence: Synthetic polypeptide
QVQLQESGGGMVQPGGSLRLSCAASGSREISTMGWHRQAPGKQRELAARITSGGITKYADSVKGRFTISRDNAKKTVYLQMNSLKSEDTAVYYCFAYDNINAYWGQGTQVTVSS

SEQ ID NO: 1354 - protein, 114 aa, synthetic construct
  REGION 1..114: note = Description of Artificial Sequence: Synthetic polypeptide
QVQLQESGGGWVQAGGSLRLSCAASGSREISTMGWHRQAPGKQRELAARITSGGITKYADSVKGRFTISRDNAKKTVYLQMNSLKSEDTAVYYCFAYDNINAYWGQGTQVTVSS

SEQ ID NO: 1355 - protein, 114 aa, synthetic construct
  REGION 1..114: note = Description of Artificial Sequence: Synthetic polypeptide
QVQLQESGGGWVQAGGSLRLSCTASGSREISTMGWHRQAPGKQRELAARITSGGITKYADSVKGRFTISRDNAKKTVYLQMDSLKSEDTAVYYCFAYDNINAYWGQGTQVTVSS

SEQ ID NO: 1356 - protein, 114 aa, synthetic construct
  REGION 1..114: note = Description of Artificial Sequence: Synthetic polypeptide
QVQLQESGGGSVQAGRSLGLSCAASGSREISTMGWHRQAPGKQRELAARITSGGITKYADSVKGRFTISRDNAKKTVYLQMNSLKSEDTAVYYCFAYDNINAYWGQGTQVTVSS

SEQ ID NO: 1357 - protein, 115 aa, synthetic construct
  REGION 1..115: note = Description of Artificial Sequence: Synthetic polypeptide
QVQLQESGGGLVQAGGSLRLSCTASGSIFRGAAMYWHRQAPGKQRELVAAITTSGNTSYADSVKGRFTISRDNAKNTMYLQIISLKPEDTAVYYCAFWIAGKAYWGQGTQVTVSS

SEQ ID NO: 1358 - protein, 115 aa, synthetic construct
  REGION 1..115: note = Description of Artificial Sequence: Synthetic polypeptide
QVQLQESGGGLVQPGGSLRLSCAASGSISSFNFMSWHRQAPGKERELAGVITRGGATNYADSVKGRFTISRDNVKNTVYLQMNGLKPEDTAVYYCHGRSQLGSTWGQGTQVTVSS

SEQ ID NO: 1359 - protein, 116 aa, synthetic construct
  REGION 1..116: note = Description of Artificial Sequence: Synthetic polypeptide
QVQLQESGGGLVQAGGSLRLSCLASGTIFTASTMGWHRQPPGKQRELVASIAGDGRTNYAESTEGRFTISRDDAKNTMYLQMNSLKPEDTAVYYCYAYYLDTYAYWGQGTQVTVSS

SEQ ID NO: 1360 - protein, 115 aa, synthetic construct
  REGION 1..115: note = Description of Artificial Sequence: Synthetic polypeptide
EVQLVESGGGLVQPGGSLTLSCAASGSIFSIASMGWYRQAPGKQRELVAVITSFSSTNYADSVKGRFTISRDNAKNSVYLQMNSLRAEDTAVYYCNARYFERTDWGQGTLVTVSS

SEQ ID NO: 1361 - protein, 114 aa, synthetic construct
  REGION 1..114: note = Description of Artificial Sequence: Synthetic polypeptide
EVQLVESGGGLVQPGGSLTLSCAASGRTSMFNSMGWHRQAPGKQRELVAIIRSGGSSNYADTVKGRFTISRDNAKNSVYLQMNSLRAEDTAVYYCFYYFQSSYWGQGTLVTVSS

SEQ ID NO: 1362 - protein, 117 aa, synthetic construct
  REGION 1..117: note = Description of Artificial Sequence: Synthetic polypeptide
EVQLVESGGGLVQPGGSLTLSCAASGSSVSFLSMAWYRQAPGKKRELVAGISVDGSTNYADSVKGRFTISRDNAKNSVYLQMNSLRAEDTAVYYCYAYRWVGRDTYWGQGTLVTVSS

SEQ ID NO: 1363 - protein, 115 aa, synthetic construct
  REGION 1..115: note = Description of Artificial Sequence: Synthetic polypeptide
EVQLVESGGGLVQPGGSLTLSCTASGSIFRGAAMYWHRQAPGKQRELVAAITTSGNTSYADSVKGRFTISRDNAKNSMYLQMNSLRAEDTAVYYCAFWIAGKAYWGQGTLVTVSS

SEQ ID NO: 1364 - protein, 116 aa, synthetic construct
  REGION 1..116: note = Description of Artificial Sequence: Synthetic polypeptide
EVQLVESGGGLVQPGGSLTLSCAASGSTFNIKTMAWHRQAPGNQRELVATLTSGGNTNYADSVKGRFTISRDNAKNSVYLQMNSLRAEDTAVYYCGLWNGVGGAYWGQGTLVTVSS

SEQ ID NO: 1365 - protein, 116 aa, synthetic construct
  REGION 1..116: note = Description of Artificial Sequence: Synthetic polypeptide
EVQLVESGGGLVQPGGSLTLSCAASGSTLNIKIMAWHRQAPGKQRELVATLTSGGNTNYADSVKGRFTISRDNAKNSVYLQMNSLRAEDTAVYYCGLWDGVGGAYWGQGTLVTVSS

SEQ ID NO: 1366 - protein, 115 aa, synthetic construct
  REGION 1..115: note = Description of Artificial Sequence: Synthetic polypeptide
EVQLVESGGGLVQPGGSLTLSCAASSSIFSISSMSWYRQAPGKQRELVAAITTFDYTNYADSVKGRFTISRDNAKNSMYLQMNSLRAEDTAVYYCNARAFGRDYWGQGTLVTVSS

SEQ ID NO: 1367 - protein, 119 aa, synthetic construct
  REGION 1..119: note = Description of Artificial Sequence: Synthetic polypeptide
EVQLVESGGGLVQPGGSLTLSCVASGSTSSINAMGWYRRAPGKQRELVAGISSDGSKNYADSVKGRFTISRDNAKNSVYLQMNSLRAEDTAVYYCYYFRTVAASSMQYWGQGTLVTVSS

SEQ ID NO: 1368 - protein, 114 aa, synthetic construct
  REGION 1..114: note = Description of Artificial Sequence: Synthetic polypeptide
EVQLVESGGGLVQPGGSLTLSCAASGFMFSSYSMSWYRQAPGKQRELVAAITSYGSTNYADSVKGRFTISRDNAKNSVYLQMNSLRAEDTAVYYCNARSWNNYWGQGTLVTVSS

SEQ ID NO: 1369 - protein, 114 aa, synthetic construct
  REGION 1..114: note = Description of Artificial Sequence: Synthetic polypeptide
EVQLVESGGGLVQPGGSLTLSCAASGSVSMFNSMGWHRQPPGKQRELVAIITSGGSSNYADTVKGRFTISRDNAKNSVYLQMNSLRAEDTAVYYCFYYFQSSYWGQGTLVTVSS

SEQ ID NO: 1370 - protein, 116 aa, synthetic construct
  REGION 1..116: note = Description of Artificial Sequence: Synthetic polypeptide
EVQLVESGGGLVQPGGSLTLSCTASGGRFSYATMGWSRQAPGKQREMVARITSSGFSTNYADSVKGRFTISRDNAKNSVYLQMNSLRAEDTAVYYCNAQHFGTDSWGQGTLVTVSS

SEQ ID NO: 1371 - protein, 115 aa, synthetic construct
  REGION 1..115: note = Description of Artificial Sequence: Synthetic polypeptide
EVQLVESGGGLVQPGGSLTLSCAASGSISSFNFMSWHRQAPGKERELAGVITRGGATNYADSVKGRFTISRDNAKNSVYLQMNSLRAEDTAVYYCHGRSQLGSTWGQGTLVTVSS

SEQ ID NO: 1372 - protein, 115 aa, synthetic construct
  REGION 1..115: note = Description of Artificial Sequence: Synthetic polypeptide
EVQLVESGGGLVQPGGSLTLSCAASESIFSINVMAWHRQAPGKQRELVARITSGGSTNYADSVKGRFTISRDNAKNSVYLQMNSLRAEDTAVYYCGAYQGLYAYWGQGTLVTVSS

SEQ ID NO: 1373 - protein, 114 aa, synthetic construct
  REGION 1..114: note = Description of Artificial Sequence: Synthetic polypeptide
EVQLVESGGGLVQPGGSLTLSCAASGSREISTMGWHRQAPGKQRELAARITSGGITKYADSVKGRFTISRDNAKNSVYLQMNSLRAEDTAVYYCFAYDNINAYWGQGTLVTVSS

SEQ ID NO: 1374 - protein, 119 aa, synthetic construct
  REGION 1..119: note = Description of Artificial Sequence: Synthetic polypeptide
EVQLVESGGGLVQPGGSLTLSCTASGSIFSIAVMGWYRQVPGKRREWVATIFDGSYTNYADSVKGRFTISRDNAKNSVYLQMNSLRAEDTAVYYCQTHWTQGSVPKESWGQGTLVTVSS

SEQ ID NO: 1375 - protein, 119 aa, synthetic construct
  REGION 1..119: note = Description of Artificial Sequence: Synthetic polypeptide
EVQLVESGGGLVQPGGSLTLSCVASGSTSSINAMGWYRRAPGKQRELVAGISSDGSKVYADSVKGRFTISRDNAKNSVYLQMNSLRAEDTAVYYCYYFRTVSGSSMRYWGQGTLVTVSS

SEQ ID NO: 1376 - protein, 115 aa, synthetic construct
  REGION 1..115: note = Description of Artificial Sequence: Synthetic polypeptide
EVQLVESGGGLVQPGGSLTLSCVASSGIFSDMSMVWYRQAPGKQRELVASITTFGSTNYADPVKGRFTISRDNAKNSVYLQMNSLRAEDTAVYYCSGRSYSSDYWGQGTLVTVSS

SEQ ID NO: 1377 - protein, 114 aa, synthetic construct
  REGION 1..114: note = Description of Artificial Sequence: Synthetic polypeptide
EVQLVESGGGLVQPGGSLTLSCAASGFMFSSYSMSWYRQAPGKQRELVAAITTWGSTNYADSVKGRFTISRDNAKNSVYLQMNSLRAEDTAVYYCNARSWNNYWGQGTLVTVSS

SEQ ID NO: 1378 - protein, 116 aa, synthetic construct
  REGION 1..116: note = Description of Artificial Sequence: Synthetic polypeptide
EVQLVESGGGLVQPGGSLTLSCTASGSRFSYATMGWSRQAPGKQRELVARITSSGFSTNYADSVKGRFTISRDNAKNSVYLQMNSLRAEDTAVYYCNAQQFGTDSWGQGTLVTVSS

SEQ ID NO: 1379 - protein, 117 aa, synthetic construct
  REGION 1..117: note = Description of Artificial Sequence: Synthetic polypeptide
EVQLVESGGGLVQPGGSLTLSCAASGSTFTSNVMGWHRQAPGKQRELVANMHSGGSTNYADSVKGRFTISRDNAKNSVYLQMNSLRAEDTAVYYCRWYGIQRAEGYWGQGTLVTVSS

SEQ ID NO: 1380 - protein, 117 aa, synthetic construct
  REGION 1..117: note = Description of Artificial Sequence: Synthetic polypeptide
EVQLVESGGGLVQPGGSLTLSCAASGSSVSFLSMAWYRQAPGKKRELVAGISTDGSTNYVDSVKGRFTISRDNAKNSVYLQMNSLRAEDTAVYYCYAYRWVGRYTYWGQGTLVTVSS

SEQ ID NO: 1381 - protein, 115 aa, synthetic construct
  REGION 1..115: note = Description of Artificial Sequence: Synthetic polypeptide
EVQLVESGGGLVQPGGSLTLSCVASGSISSIIVMGWSRQAPGKQRESVATITRDGTRNYADSLKGRFTISRDNAKNSSYLQMNSLRAEDTAVYYCYARYGDINYWGQGTLVTVSS

SEQ ID NO: 1382 - protein, 117 aa, synthetic construct
  REGION 1..117: note = Description of Artificial Sequence: Synthetic polypeptide
EVQLVESGGGLVQPGGSLTLSCAASGSSVSFLSMAWYRQAPGKKRELVAGISADGSTDYIDSVKGRFTISRDNAKNSVYLQMNSLRAEDTAVYYCYAYRWTTRYTYWGQGTLVTVSS

SEQ ID NO: 1383 - protein, 116 aa, synthetic construct
  REGION 1..116: note = Description of Artificial Sequence: Synthetic polypeptide
EVQLVESGGGLVQPGGSLTLSCLASGTIFTASTMGWHRQPPGKQRELVASIAGDGRTNYAESTEGRFTISRDNAKNSMYLQMNSLRAEDTAVYYCYAYYLDTYAYWGQGTLVTVSS

SEQ ID NO: 1384 - protein, 117 aa, synthetic construct
  REGION 1..117: note = Description of Artificial Sequence: Synthetic polypeptide
EVQLVESGGGLVQPGGSLTLSCAASGSSVSFLSMAWYRQAPGKKRELVAGISVDGSTNYADSVKGRFTISRDNAKNSVYLQMNSLRAEDTAVYYCYAYRWEGRNTYWGQGTLVTVSS

SEQ ID NO: 1385 - protein, 117 aa, synthetic construct
  REGION 1..117: note = Description of Artificial Sequence: Synthetic polypeptide
EVQLVESGGGLVQPGGSLTLSCVASGSSFSHNTMGWYRQAPGKQRDLVARITTFGTTNYADSVKGRFTISRDNAKNSVYLQMNSLRAEDTAVYYCNGESFGRIWYNWGQGTLVTVSS

SEQ ID NO: 1386 - protein, 115 aa, synthetic construct
  REGION 1..115: note = Description of Artificial Sequence: Synthetic polypeptide
EVQLVESGGGLVQPGGSLTLSCVASGSISSIIVMGWSRQAPGKQRESLATISRGGTRTYADSVKGRFTISRDNAKNSSYLQMNSLRAEDTAVYYCYARYGDINYWGQGTLVTVSS

SEQ ID NO: 1387 - protein, 115 aa, synthetic construct
  REGION 1..115: note = Description of Artificial Sequence: Synthetic polypeptide
EVQLVESGGGLVQPGGSLTLSCVASGSSFSITSMAWYRQAPGKQRDLVAAITSFGSTNYADSVKDRFTISRDNAKNSVYLQMNSLRAEDTAVYYCNGRVFDHVYWGQGTLVTVSS

SEQ ID NO: 1388 - protein, 114 aa, synthetic construct
  REGION 1..114: note = Description of Artificial Sequence: Synthetic polypeptide
EVQLVESGGGLVQPGGSLTLSCAASGRTSMVNSMGWHRQAPGKQRELVALITSGGSSNYADTVKGRFTISRDNAKNSVYLQMNSLRAEDTAVYYCFYYFQSSYWGQGTLVTVSS

SEQ ID NO: 1389 - protein, 116 aa, synthetic construct
  REGION 1..116: note = Description of Artificial Sequence: Synthetic polypeptide
EVQLVESGGGLVQPGGSLTLSCAASGSTFNFKIMAWHRQAPGKQRELVASLTSEGLTNYRDSVKGRFTISRDNAKNSVYLQMNSLRAEDTAVYYCGLWDGVGGAYWGQGTLVTVSS

SEQ ID NO: 1390 - protein, 117 aa, synthetic construct
  REGION 1..117: note = Description of Artificial Sequence: Synthetic polypeptide
EVQLVESGGGLVQPGGSLTLSCAASGFTLDYYAIGWYRQAPGKKRELVAGISSDGSTHYVDSVKGRFTISRDNAKNSVYLQMNSLRAEDTAVYYCYAYRWVGGYTYWGQGTLVTVSS

SEQ ID NO: 1391 - protein, 114 aa, synthetic construct
  REGION 1..114: note = Description of Artificial Sequence: Synthetic polypeptide
EVQLVESGGGLVQPGGSLTLSCVASGSIFTTNSMGWHRQGPGKQRELVALIGSAGSTKYADSVKGRFTISRDNAKNSVYLQMNSLRAEDTAVYYCFYYDSRSYWGQGTLVTVSS

SEQ ID NO: 1392 - protein, 118 aa, synthetic construct
  REGION 1..118: note = Description of Artificial Sequence: Synthetic polypeptide
EVQLVESGGGLVQPGGSLTLSCAASGITSSVYSMGWYRQAPGKQRELVAGSSSDGSTHYVDSVRGRFTISRDNAKNSVYLQMNSLRAEDTAVYYCYANRGFAGAPSYWGQGTLVTVSS

SEQ ID NO: 1393 - protein, 115 aa, synthetic construct
  REGION 1..115: note = Description of Artificial Sequence: Synthetic polypeptide
EVQLVESGGGLVQPGGSLTLSCAASSSIFSISSMSWYRQAPGKQRELVAAITSFGSTNYADSVKGRFTISRDNAKNSMYLQMNSLRAEDTAVYYCNARTMGRDYWGQGTLVTVSS

SEQ ID NO: 1394 - protein, 119 aa, synthetic construct
  REGION 1..119: note = Description of Artificial Sequence: Synthetic polypeptide
EVQLVESGGGLVQPGGSLTLSCVASGFTSSINAMGWYRRAPGKQRELVAGISSDGSFVYADSVKGRFTISRDNAKNSVYLQMNSLRAEDTAVYYCYYFRHVSGSSMRYWGQGTLVTVSS

SEQ ID NO: 1395 - protein, 119 aa, synthetic construct
  REGION 1..119: note = Description of Artificial Sequence: Synthetic polypeptide
EVQLVESGGGLVQPGGSLTLSCVASGSTSSINAMAWYRRAPGKQRELVAGISSDGSKVYADSVKGRFTISRDNAKNSVYLQMNSLRAEDTAVYYCYYFRTVSGSSSRYWGQGTLVTVSS

SEQ ID NO: 1396 - protein, 119 aa, synthetic construct
  REGION 1..119: note = Description of Artificial Sequence: Synthetic polypeptide
EVQLVESGGGLVQPGGSLTLSCVASGSTSSINAMGWYRRAPGKQRELVAGISSDGSKVYEDSVKGRFTISRDNAKNSVYLQMNSLRAEDTAVYYCYYFRTVSGSSMRYWGQGTLVTVSS

SEQ ID NO: 1397 - protein, 119 aa, synthetic construct
  REGION 1..119: note = Description of Artificial Sequence: Synthetic polypeptide
EVQLVESGGGLVQPGGSLTLSCVASGSPSSINAMGWYRRAPGKQRELSAGISSDGSKVYADSVKGRFTISRDNAKNSVYLQMNSLRAEDTAVYYCYYFRTVRGSSMSYWGQGTLVTVSS

SEQ ID NO: 1398 - protein, 119 aa, synthetic construct
  REGION 1..119: note = Description of Artificial Sequence: Synthetic polypeptide
EVQLVESGGGLVQPGGSLTLSCVASGSTSSINAMGWYRRAPGKQRELAAGISSDGSSVYADSVKGRFTISRDNAKNSVYLQMNSLRAEDTAVYYCYYFRTVSGSSKRYWGQGTLVTVSS

SEQ ID NO: 1399 - protein, 119 aa, synthetic construct
  REGION 1..119: note = Description of Artificial Sequence: Synthetic polypeptide
EVQLVESGGGLVQPGGSLTLSCVASGSISSINAMGWYRRAPGKQRELVAGISSDGSKVYADSVKGRFTISRDNAKNSVYLQMNSLRAEDTAVYYCYYFRMVSGSSMRYWGQGTLVTVSS

SEQ ID NO: 1400 - protein, 119 aa, synthetic construct
  REGION 1..119: note = Description of Artificial Sequence: Synthetic polypeptide
EVQLVESGGGLVQPGGSLTLSCVASGSTSSINAMAWYRRAPGKQRELVAGISSDGSKLYADSVKGRFTISRDNAKNSVYLQMNSLRAEDTAVYYCYYFRTVQGSSMRYWGQGTLVTVSS

SEQ ID NO: 1401 - protein, 119 aa, synthetic construct
  REGION 1..119: note = Description of Artificial Sequence: Synthetic polypeptide
EVQLVESGGGLVQPGGSLTLSCVASGSTSSINAYGWYRRAPGKQRELVAGISSDGSKVYADSVKGRFTISRDNAKNSVYLQMNSLRAEDTAVYYCYYFRTVYGSSMRYWGQGTLVTVSS

SEQ ID NO: 1402 - protein, 119 aa, synthetic construct
  REGION 1..119: note = Description of Artificial Sequence: Synthetic polypeptide
EVQLVESGGGLVQPGGSLTLSCVASGSTSSINAIGWYRRAPGKQRELVAGISSDGSKVYIDSVKGRFTISRDNAKNSVYLQMNSLRAEDTAVYYCYYFRTVSGSSYRYWGQGTLVTVSS

SEQ ID NO: 1403 - protein, 119 aa, synthetic construct
  REGION 1..119: note = Description of Artificial Sequence: Synthetic polypeptide
EVQLVESGGGLVQPGGSLTLSCVASGSTSSINAMAWYRRAPGKQRELVAGISSDGSKVYSDSVKGRFTISRDNAKNSVYLQMNSLRAEDTAVYYCYYFRTVLGSSMRYWGQGTLVTVSS

SEQ ID NO: 1404 - protein, 119 aa, synthetic construct
  REGION 1..119: note = Description of Artificial Sequence: Synthetic polypeptide
EVQLVESGGGLVQPGGSLTLSCVASGSTSIINAMGWYRRAPGKQRELAAGISSDGSKVIADSVKGRFTISRDNAKNSVYLQMNSLRAEDTAVYYCYYFRRVSGSSMRYWGQGTLVTVSS

SEQ ID NO: 1405 - protein, 119 aa, synthetic construct
  REGION 1..119: note = Description of Artificial Sequence: Synthetic polypeptide
EVQLVESGGGLVQPGGSLTLSCVASGSTSSINAMGWYRRAPGKQRELVAGISSDGSKIYADSVKGRFTISRDNAKNSVYLQMNSLRAEDTAVYYCYYFRTVSGSSMRYWGQGTLVTVSS

SEQ ID NO: 1406 - protein, 119 aa, synthetic construct
  REGION 1..119: note = Description of Artificial Sequence: Synthetic polypeptide
EVQLVESGGGLVQPGGSLTLSCVASGKTSSINAMAWYRRAPGKQRELVAGISSDGSKVYTDSVKGRFTISRDNAKNSVYLQMNSLRAEDTAVYYCYYFRTVSGSSARYWGQGTLVTVSS

SEQ ID NO: 1407 - protein, 119 aa, synthetic construct
  REGION 1..119: note = Description of Artificial Sequence: Synthetic polypeptide
EVQLVESGGGLVQPGGSLTLSCVASGTTSSINAMGWYRRAPGKQRELVAGISSDGSLVYADSVKGRFTISRDNAKNSVYLQMNSLRAEDTAVYYCYYFRIVRGSSMRYWGQGTLVTVSS

SEQ ID NO: 1408 - protein, 119 aa, synthetic construct
  REGION 1..119: note = Description of Artificial Sequence: Synthetic polypeptide
EVQLVESGGGLVQPGGSLTLSCVASGSTSSINAMAWYRRAPGKQRELVAGISSDGSKVYADSVKGRFTISRDNAKNSVYLQMNSLRAEDTAVYYCYYYRTVSGSSMRYWGQGTLVTVSS

SEQ ID NO: 1409 - protein, 119 aa, synthetic construct
  REGION 1..119: note = Description of Artificial Sequence: Synthetic polypeptide
EVQLVESGGGLVQPGGSLTLSCVASGSGSSINAMGWYRRAPGKQRELVAGISSDGSKVYSDSVKGRFTISRDNAKNSVYLQMNSLRAEDTAVYYCYYFRHVSGSSMRYWGQGTLVTVSS

SEQ ID NO: 1410 - protein, 119 aa, synthetic construct
  REGION 1..119: note = Description of Artificial Sequence: Synthetic polypeptide
EVQLVESGGGLVQPGGSLTLSCVASGTTSSINAMGWYRRAPGKQRELVAGISSDGSKVYVDSVKGRFTISRDNAKNSVYLQMNSLRAEDTAVYYCYYFRFVSGSSMRYWGQGTLVTVSS

SEQ ID NO: 1411 - protein, 119 aa, synthetic construct
  REGION 1..119: note = Description of Artificial Sequence: Synthetic polypeptide
EVQLVESGGGLVQPGGSLTLSCVASGSTSSINAMAWYRRAPGKQRELVAGISSDGSKVYVDSVKGRFTISRDNAKNSVYLQMNSLRAEDTAVYYCYYFRTVSGSSMRYWGQGTLVTVSS

SEQ ID NO: 1412 - protein, 119 aa, synthetic construct
  REGION 1..119: note = Description of Artificial Sequence: Synthetic polypeptide
EVQLVESGGGLVQPGGSLTLSCVASGSTSRINAMGWYRRAPGKQRELVAGISSDGSKVYADSVKGRFTISRDNAKNSVYLQMNSLRAEDTAVYYCYYFRTKSGSSMRYWGQGTLVTVSS

SEQ ID NO: 1413 - protein, 119 aa, synthetic construct
  REGION 1..119: note = Description of Artificial Sequence: Synthetic polypeptide
EVQLVESGGGLVQPGGSLTLSCVASGSTSRINAMGWYRRAPGKQRELVAGISSDGSKVYADSVKGRFTISRDNAKNSVYLQMNSLRAEDTAVYYCYYFRTVYGSSMRYWGQGTLVTVSS

SEQ ID NO: 1414 - protein, 119 aa, synthetic construct
  REGION 1..119: note = Description of Artificial Sequence: Synthetic polypeptide
EVQLVESGGGLVQPGGSLTLSCVASGSTSSINAMGWYRRAPGKQRELVAGISSDGSKVYRDSVKGRFTISRDNAKNSVYLQMNSLRAEDTAVYYCYYFRTVSGSSMGYWGQGTLVTVSS

SEQ ID NO: 1415 - protein, 119 aa, synthetic construct
  REGION 1..119: note = Description of Artificial Sequence: Synthetic polypeptide
EVQLVESGGGLVQPGGSLTLSCVASGSTSSINAMAWYRRAPGKQRELVAGISSDGSKVYSDSVKGRFTISRDNAKNSVYLQMNSLRAEDTAVYYCYYFRTVSGSSMRSWGQGTLVTVSS

SEQ ID NO: 1416 - protein, 119 aa, synthetic construct
  REGION 1..119: note = Description of Artificial Sequence: Synthetic polypeptide
EVQLVESGGGLVQPGGSLTLSCVASGSTSSINAMAWYRRAPGKQRELVAGISSDNSKVYADSVKGRFTISRDNAKNSVYLQMNSLRAEDTAVYYCYYFRTVGGSSMRYWGQGTLVTVSS

SEQ ID NO: 1417 - protein, 119 aa, synthetic construct
  REGION 1..119: note = Description of Artificial Sequence: Synthetic polypeptide
EVQLVESGGGLVQPGGSLTLSCVASGNTSSINAMAWYRRAPGKQRELVAGISSDGSKVYADSVKGRFTISRDNAKNSVYLQMNSLRAEDTAVYYCYYFRTVSGSSMRYWGQGTLVTVSS

SEQ ID NO: 1418 - protein, 119 aa, synthetic construct
  REGION 1..119: note = Description of Artificial Sequence: Synthetic polypeptide
EVQLVESGGGLVQPGGSLTLSCVASGSTSSINAMAWYRRAPGKQRELVAGISSDGSKVYADSVKGRFTISRDNAKNSVYLQMNSLRAEDTAVYYCYYFRTVSGSHMRYWGQGTLVTVSS

SEQ ID NO: 1419 - protein, 119 aa, synthetic construct
  REGION 1..119: note = Description of Artificial Sequence: Synthetic polypeptide
EVQLVESGGGLVQPGGSLTLSCVASGSTSIINAMGWYRRAPGKQRELVAGISSDGSKVYEDSVKGRFTISRDNAKNSVYLQMNSLRAEDTAVYYCYYFRAVSGSSMRYWGQGTLVTVSS

SEQ ID NO: 1420 - protein, 119 aa, synthetic construct
  REGION 1..119: note = Description of Artificial Sequence: Synthetic polypeptide
EVQLVESGGGLVQPGGSLTLSCVASGSTSSINAMAWYRRAPGKQRELVAGISSDGSKVYADSVKGRFTISRDNAKNSVYLQMNSLRAEDTAVYYCYYFRTVSGSSMRYWGQGTLVTVSS

SEQ ID NO: 1421 - protein, 119 aa, synthetic construct
  REGION 1..119: note = Description of Artificial Sequence: Synthetic polypeptide
EVQLVESGGGLVQPGGSLTLSCVASGSTSRINAMGWYRRAPGKQRELPAGISSDGSKVYAVSVKGRFTISRDNAKNSVYLQMNSLRAEDTAVYYCYYFRTVSGSPMRYWGQGTLVTVSS

SEQ ID NO: 1422 - protein, 119 aa, synthetic construct
  REGION 1..119: note = Description of Artificial Sequence: Synthetic polypeptide
EVQLVESGGGLVQPGGSLTLSCVASGSTSRINAMGWYRRAPGKQRELVAGVSSDGSKVYADSVKGRFTISRDNAKNSVYLQMNSLRAEDTAVYYCYYFRTVSGSSMSYWGQGTLVTVSS

SEQ ID NO: 1423 - protein, 119 aa, synthetic construct
  REGION 1..119: note = Description of Artificial Sequence: Synthetic polypeptide
EVQLVESGGGLVQPGGSLTLSCVASGTTSSINAMGWYRRAPGKQRELVAGISSDGSKVYEDSVKGRFTISRDNAKNSVYLQMNSLRAEDTAVYYCYYFRTVSGSSMRYWGQGTLVTVSS

SEQ ID NO: 1424 - protein, 119 aa, synthetic construct
  REGION 1..119: note = Description of Artificial Sequence: Synthetic polypeptide
EVQLVESGGGLVQPGGSLTLSCVASGITSSINAMGWYRRAPGKQRELVAGISSDGSKVYAGSVKGRFTISRDNAKNSVYLQMNSLRAEDTAVYYCYYFRTVRGSSMRYWGQGTLVTVSS

SEQ ID NO: 1425 - protein, 119 aa, synthetic construct
  REGION 1..119: note = Description of Artificial Sequence: Synthetic polypeptide
EVQLVESGGGLVQPGGSLTLSCVASGSTSDINAMGWYRRAPGKQRELVAGISSDKSKVYADSVKGRFTISRDNAKNSVYLQMNSLRAEDTAVYYCYYFRTVRGSSMRYWGQGTLVTVSS

SEQ ID NO: 1426 - protein, 119 aa, synthetic construct
  REGION 1..119: note = Description of Artificial Sequence: Synthetic polypeptide
EVQLVESGGGLVQPGGSLTLSCVASGSTSSINAMAWYRRAPGKQRELVAGISSNGSKVYADSVKGRFTISRDNAKNSVYLQMNSLRAEDTAVYYCYYFRQVSGSSMRYWGQGTLVTVSS

SEQ ID NO: 1427 - protein, 119 aa, synthetic construct
  REGION 1..119: note = Description of Artificial Sequence: Synthetic polypeptide
EVQLVESGGGLVQPGGSLTLSCVASGSTSSINAIGWYRRAPGKQRELVAGISSDGSKVLADSVKGRFTISRDNAKNSVYLQMNSLRAEDTAVYYCYYFRIVSGSSMGYWGQGTLVTVSS

SEQ ID NO: 1428 - protein, 119 aa, synthetic construct
  REGION 1..119: note = Description of Artificial Sequence: Synthetic polypeptide
EVQLVESGGGLVQPGGSLTLSCVASGSTSSKNAMGWYRRAPGKQRELVAGISSDGSKVYADSVKGRFTISRDNAKNSVYLQMNSLRAEDTAVYYCYYFRTVSGASMRYWGQGTLVTVSS

SEQ ID NO: 1429 - protein, 119 aa, synthetic construct
  REGION 1..119: note = Description of Artificial Sequence: Synthetic polypeptide
EVQLVESGGGLVQPGGSLTLSCVASGSTSSINAMGWYRRAPGKQRELVAGISSDNSKVYADSVKGRFTISRDNAKNSVYLQMNSLRAEDTAVYYCYYFRTVHGSSMRYWGQGTLVTVSS

SEQ ID NO: 1430 - protein, 119 aa, synthetic construct
  REGION 1..119: note = Description of Artificial Sequence: Synthetic polypeptide
EVQLVESGGGLVQPGGSLTLSCVASGLTSSINAMGWYRRAPGKQRELVAGISSDGSKVYADSVKGRFTISRDNAKNSVYLQMNSLRAEDTAVYYCYYFRMVSGSSMRYWGQGTLVTVSS

SEQ ID NO: 1431 - protein, 119 aa, synthetic construct
  REGION 1..119: note = Description of Artificial Sequence: Synthetic polypeptide
EVQLVESGGGLVQPGGSLTLSCVASGSTSSINAMAWYRRAPGKQRELVAGISSDGSKVYTDSVKGRFTISRDNAKNSVYLQMNSLRAEDTAVYYCYYFRTISGSSMRYWGQGTLVTVSS

SEQ ID NO: 1432 - protein, 119 aa, synthetic construct
  REGION 1..119: note = Description of Artificial Sequence: Synthetic polypeptide
EVQLVESGGGLVQPGGSLTLSCVASGSTSSNNAMAWYRRAPGKQRELVAGISSDGSKVYTDSVKGRFTISRDNAKNSVYLQMNSLRAEDTAVYYCYYFRTRSGSSMRYWGQGTLVTVSS

SEQ ID NO: 1433 - protein, 119 aa, synthetic construct
  REGION 1..119: note = Description of Artificial Sequence: Synthetic polypeptide
EVQLVESGGGLVQPGGSLTLSCVASGSTSSINAMAWYRRAPGKQRELVAGISSDNSKVYADSVKGRFTISRDNAKNSVYLQMNSLRAEDTAVYYCYYFRTVSGHSMRYWGQGTLVTVSS

SEQ ID NO: 1434 - protein, 119 aa, synthetic construct
  REGION 1..119: note = Description of Artificial Sequence: Synthetic polypeptide
EVQLVESGGGLVQPGGSLTLSCVASGSTSHINAMGWYRRAPGKQRELVAGISSDGSRVYADSVKGRFTISRDNAKNSVYLQMNSLRAEDTAVYYCYYFRTVSGGSMRYWGQGTLVTVSS

SEQ ID NO: 1435 - protein, 119 aa, synthetic construct
  REGION 1..119: note = Description of Artificial Sequence: Synthetic polypeptide
EVQLVESGGGLVQPGGSLTLSCVASGQTSSINAMGWYRRAPGKQRELVAGISSDGSQVYADSVKGRFTISRDNAKNSVYLQMNSLRAEDTAVYYCYYFRTKSGSSMRYWGQGTLVTVSS

SEQ ID NO: 1436 - protein, 119 aa, synthetic construct
  REGION 1..119: note = Description of Artificial Sequence: Synthetic polypeptide
EVQLVESGGGLVQPGGSLTLSCVASGSTSRINGMGWYRRAPGKQRELPAGISSDGSKAYADSVKGRFTISRDNAKNSVYLQMNSLRAEDTAVYYCYYFRTASGTSMRYWGQGTLVTVSS

SEQ ID NO: 1437 - protein, 119 aa, synthetic construct
  REGION 1..119: note = Description of Artificial Sequence: Synthetic polypeptide
EVQLVESGGGLVQPGGSLTLSCVASGSTSVINAMAWYRRAPGKQRELAAGISSDGSKVYAKSAKGRFTISRDNAKNSVYLQMNSLRAEDTAVYYCYYFNTVSGSSMRYWGQGTLVTVSS

SEQ ID NO: 1438 - protein, 119 aa, synthetic construct
  REGION 1..119: note = Description of Artificial Sequence: Synthetic polypeptide
EVQLVESGGGLVQPGGSLTLSCVASGSTSSINAMAWYRRAPGKQRELVAGISSDGSKVYNDSVKGRFTISRDNAKNSVYLQMNSLRAEDTAVYYCYYFRTVRGSSQRYWGQGTLVTVSS

SEQ ID NO: 1439 - protein, 119 aa, synthetic construct
  REGION 1..119: note = Description of Artificial Sequence: Synthetic polypeptide
EVQLVESGGGLVQPGGSLTLSCVASGKTSSINAMGWYRRAPGKQRELVAGISSDGSKVIADSVKGRFTISRDNAKNSVYLQMNSLRAEDTAVYYCYYFRTVLGSSMRYWGQGTLVTVSS

SEQ ID NO: 1440 - protein, 119 aa, synthetic construct
  REGION 1..119: note = Description of Artificial Sequence: Synthetic polypeptide
EVQLVESGGGLVQPGGSLTLSCVASGSTSSINAMAWYRRAPGKQRELVAGISSDGSKVYTDSVKGRFTISRDNAKNSVYLQMNSLRAEDTAVYYCYYFRTRSGSSMRYWGQGTLVTVSS

SEQ ID NO: 1441 - protein, 119 aa, synthetic construct
  REGION 1..119: note = Description of Artificial Sequence: Synthetic polypeptide
EVQLVESGGGLVQPGGSLTLSCVASGSVSSINAMGWYRRAPGKQRELVAGISSDGSKVYIDSVKGRFTISRDNAKNSVYLQMNSLRAEDTAVYYCYYFRTVSGLSMRYWGQGTLVTVSS

SEQ ID NO: 1442 - protein, 119 aa, synthetic construct
  REGION 1..119: note = Description of Artificial Sequence: Synthetic polypeptide
EVQLVESGGGLVQPGGSLTLSCVASGNTSSINAMGWYRRAPGKQRELVAGISSDGSKVYYDSVKGRFTISRDNAKNSVYLQMNSLRAEDTAVYYCYYFRTVRGSSQRYWGQGTLVTVSS

SEQ ID NO: 1443 - protein, 119 aa, synthetic construct
  REGION 1..119: note = Description of Artificial Sequence: Synthetic polypeptide
EVQLVESGGGLVQPGGSLTLSCVASGSTSSTNAMGWYRRAPGKQRELVAGISSDGSKVYVDSVKGRFTISRDNAKNSVYLQMNSLRAEDTAVYYCYYFRTVSGSSMVYWGQGTLVTVSS

SEQ ID NO: 1444 - protein, 119 aa, synthetic construct
  REGION 1..119: note = Description of Artificial Sequence: Synthetic polypeptide
EVQLVESGGGLVQPGGSLTLSCVASGSTSSINAMGWYRRAPGKQRELVAGISSDGSKVYGDSVKGRFTISRDNAKNSVYLQMNSLRAEDTAVYYCYYFRTVSRSSMRYWGQGTLVTVSS

SEQ ID NO: 1445 - protein, 119 aa, synthetic construct
  REGION 1..119: note = Description of Artificial Sequence: Synthetic polypeptide
EVQLVESGGGLVQPGGSLTLSCVASGSTSSINAMAWYRRAPGKQRELAAGISSDQSKVYADSAKGRFTISRDNAKNSVYLQMNSLRAEDTAVYYCYYFRTVSGSSMSYWGQGTLVTVSS

SEQ ID NO: 1446 - protein, 119 aa, synthetic construct
  REGION 1..119: note = Description of Artificial Sequence: Synthetic polypeptide
EVQLVESGGGLVQPGGSLTLSCVASGGTSSINAMGWYRRAPGKQRELVAGISSDGSKVYSDSVKGRFTISRDNAKNSVYLQMNSLRAEDTAVYYCYYFRTVSGSSARYWGQGTLVTVSS

SEQ ID NO: 1447 - protein, 119 aa, synthetic construct
  REGION 1..119: note = Description of Artificial Sequence: Synthetic polypeptide
EVQLVESGGGLVQPGGSLTLSCVASGSTRSINAMGWYRRAPGKQRELVAGISSDGSKVYADSVKGRFTISRDNAKNSVYLQMNSLRAEDTAVYYCYYFHTVSGSSMRYWGQGTLVTVSS

SEQ ID NO: 1448 - protein, 119 aa, synthetic construct
  REGION 1..119: note = Description of Artificial Sequence: Synthetic polypeptide
EVQLVESGGGLVQPGGSLTLSCVASGTTSSINAMGWYRRAPGKQRELVAGISSDGSKVIADSVKGRFTISRDNAKNSVYLQMNSLRAEDTAVYYCYYFRTVLGSSMRYWGQGTLVTVSS

SEQ ID NO: 1449 - protein, 119 aa, synthetic construct
  REGION 1..119: note = Description of Artificial Sequence: Synthetic polypeptide
EVQLVESGGGLVQPGGSLTLSCVASGSTSSINAMGWYRRAPGKQRELVAGISSDGSKVDADSVKGRFTISRDNAKNSVYLQMNSLRAEDTAVYYCYYFRTVSGSSMRYWGQGTLVTVSS

SEQ ID NO: 1450 - protein, 119 aa, synthetic construct
  REGION 1..119: note = Description of Artificial Sequence: Synthetic polypeptide
EVQLVESGGGLVQPGGSLTLSCVASGSTSSINAMAWYRRAPGKQRELVAGISSDGSKVYKDSVKGRFTISRDNAKNSVYLQMNSLRAEDTAVYYCYYFRNVSGSSMRYWGQGTLVTVSS

SEQ ID NO: 1451 - protein, 119 aa, synthetic construct
  REGION 1..119: note = Description of Artificial Sequence: Synthetic polypeptide
EVQLVESGGGLVQPGGSLTLSCVASGNTSSINAMGWYRRAPGKQRELVAGISSNGSKVYADSVKGRFTISRDNAKNSVYLQMNSLRAEDTAVYYCYYFRTVTGSSMRYWGQGTLVTVSS

SEQ ID NO: 1452 - protein, 119 aa, synthetic construct
  REGION 1..119: note = Description of Artificial Sequence: Synthetic polypeptide
EVQLVESGGGLVQPGGSLTLSCVASGSTSRINAMGWYRRAPGKQRELVAGISSDGSKVYKDSVKGRFTISRDNAKNSVYLQMNSLRAEDTAVYYCYYFRTVSGSSMRYWGQGTLVTVSS

SEQ ID NO: 1453 - protein, 119 aa, synthetic construct
  REGION 1..119: note = Description of Artificial Sequence: Synthetic polypeptide
EVQLVESGGGLVQPGGSLTLSCVASGSTSSINAIGWYRRAPGKQRELVAGISSDGSKVYADSVKGRFTISRDNAKNSVYLQMNSLRAEDTAVYYCYYFRTVKGSSMRYWGQGTLVTVSS

SEQ ID NO: 1454 - protein, 119 aa, synthetic construct
  REGION 1..119: note = Description of Artificial Sequence: Synthetic polypeptide
EVQLVESGGGLVQPGGSLTLSCVASGLTSSINAMGWYRRAPGKQRELVAGISSDGSKVYQDSVKGRFTISRDNAKNSVYLQMNSLRAEDTAVYYCYYFRTNSGSSMRYWGQGTLVTVSS

SEQ ID NO: 1455 - protein, 119 aa, synthetic construct
  REGION 1..119: note = Description of Artificial Sequence: Synthetic polypeptide
EVQLVESGGGLVQPGGSLTLSCVASGSTSSINAMAWYRRAPGKQRELVAGISSDGSKVYAESVKGRFTISRDNAKNSVYLQMNSLRAEDTAVYYCYYFRTVSGASMRYWGQGTLVTVSS

SEQ ID NO: 1456 - protein, 119 aa, synthetic construct
  REGION 1..119: note = Description of Artificial Sequence: Synthetic polypeptide
EVQLVESGGGLVQPGGSLTLSCVASGSTSSTNAMGWYRRAPGKQRELVAGISSDGSKVLADSVKGRFTISRDNAKNSVYLQMNSLRAEDTAVYYCYYFRTVNLSSMRYWGQGTLVTVSS

SEQ ID NO: 1457 - protein, 119 aa, synthetic construct
  REGION 1..119: note = Description of Artificial Sequence: Synthetic polypeptide
EVQLVESGGGLVQPGGSLTLSCVASGSTSSINAIGWYRRAPGKQRELVAGISSDGSKYYADSVKGRFTISRDNAKNSVYLQMNSLRAEDTAVYYCYYFRTVTGSSMRYWGQGTLVTVSS

SEQ ID NO: 1458 - protein, 119 aa, synthetic construct
  REGION 1..119: note = Description of Artificial Sequence: Synthetic polypeptide
EVQLVESGGGLVQPGGSLTLSCVASGSTSSINAIGWYRRAPGKQRELVAGISSDGSKVYAVSVKGRFTISRDNAKNSVYLQMNSLRAEDTAVYYCYYFRKVSGSSARYWGQGTLVTVSS

SEQ ID NO: 1459 - protein, 119 aa, synthetic construct
  REGION 1..119: note = Description of Artificial Sequence: Synthetic polypeptide
EVQLVESGGGLVQPGGSLTLSCVASGSTSSINAMGWYRRAPGKQRELVAGISSDGSKVVADSVKGRFTISRDNAKNSVYLQMNSLRAEDTAVYYCYYFRTYSGSSMRYWGQGTLVTVSS

SEQ ID NO: 1460 - protein, 119 aa, synthetic construct
  REGION 1..119: note = Description of Artificial Sequence: Synthetic polypeptide
EVQLVESGGGLVQPGGSLTLSCVASGSTSSINAMGWYRRAPGKQRELVAGISSDGSKVYADSVKGRFTISRDNAKNSVYLQMNSLRAEDTAVYYCYYFRTVSKSSMRYWGQGTLVTVSS

SEQ ID NO: 1461 - protein, 119 aa, synthetic construct
  REGION 1..119: note = Description of Artificial Sequence: Synthetic polypeptide
EVQLVESGGGLVQPGGSLTLSCVASGSTSSINAMAWYRRAPGKQRELVAGISSDGSKVYADSVKGRFTISRDNAKNSVYLQMNSLRAEDTAVYYCYYFKTVSGSSMRYWGQGTLVTVSS

SEQ ID NO: 1462 - protein, 119 aa, synthetic construct
  REGION 1..119: note = Description of Artificial Sequence: Synthetic polypeptide
EVQLVESGGGLVQPGGSLTLSCVASGSTSSINAMAWYRRAPGKQRELAAGISSDNSKVYADSVKGRFTISRDNAKNSVYLQMNSLRAEDTAVYYCYYFRTRSGSSMRYWGQGTLVTVSS

SEQ ID NO: 1463 - protein, 119 aa, synthetic construct
  REGION 1..119: note = Description of Artificial Sequence: Synthetic polypeptide
EVQLVESGGGLVQPGGSLTLSCVASGSKSSINAMGWYRRAPGKQRELAAGISSDGSKVYAQSVKGRFTISRDNAKNSVYLQMNSLRAEDTAVYYCYYFRTSSGSSMRYWGQGTLVTVSS

SEQ ID NO: 1464 - protein, 119 aa, synthetic construct
  REGION 1..119: note = Description of Artificial Sequence: Synthetic polypeptide
EVQLVESGGGLVQPGGSLTLSCVASGTTSSINAMGWYRRAPGKQRELVAGISSDGSKVYVDSVKGRFTISRDNAKNSVYLQMNSLRAEDTAVYYCYYFRFLSGSSMRYWGQGTLVTVSS

SEQ ID NO: 1465 - protein, 119 aa, synthetic construct
  REGION 1..119: note = Description of Artificial Sequence: Synthetic polypeptide
EVQLVESGGGLVQPGGSLTLSCVASGSTSSINAFGWYRRAPGKQRELVAGISSDGSKVYSDSVKGRFTISRDNAKNSVYLQMNSLRAEDTAVYYCYYFRTVSGSSMRYWGQGTLVTVSS

SEQ ID NO: 1466 - protein, 119 aa, synthetic construct
  REGION 1..119: note = Description of Artificial Sequence: Synthetic polypeptide
EVQLVESGGGLVQPGGSLTLSCVASGSTFSINAMGWYRRAPGKQRELVAGISSDGSKVLADSVKGRFTISRDNAKNSVYLQMNSLRAEDTAVYYCYYFRLVSGSSMRYWGQGTLVTVSS

SEQ ID NO: 1467 - protein, 119 aa, synthetic construct
  REGION 1..119: note = Description of Artificial Sequence: Synthetic polypeptide
EVQLVESGGGLVQPGGSLTLSCVASGSTRSINAMGWYRRAPGKQRELVAGISSDGSKVYNDSVKGRFTISRDNAKNSVYLQMNSLRAEDTAVYYCYYFRTVSGSSMRFWGQGTLVTVSS

SEQ ID NO: 1468 - protein, 119 aa, synthetic construct
  REGION 1..119: note = Description of Artificial Sequence: Synthetic polypeptide
EVQLVESGGGLVQPGGSLTLSCVASGSTSSINAIGWYRRAPGKQRELVAGISSDGSKVYNDSVKGRFTISRDNAKNSVYLQMNSLRAEDTAVYYCYYFRTQSGSSMRYWGQGTLVTVSS

SEQ ID NO: 1469 - protein, 119 aa, synthetic construct
  REGION 1..119: note = Description of Artificial Sequence: Synthetic polypeptide
EVQLVESGGGLVQPGGSLTLSCVASGSTSSINAMGWYRRAPGKQRELVAGISSDGSKVYVDSVKGRFTISRDNAKNSVYLQMNSLRAEDTAVYYCYYFRTVSGSSMPYWGQGTLVTVSS

SEQ ID NO: 1470 - protein, 119 aa, synthetic construct
  REGION 1..119: note = Description of Artificial Sequence: Synthetic polypeptide
EVQLVESGGGLVQPGGSLTLSCVASGSTSSINAMGWYRRAPGKQRELVAGISSDGSKVVADSVKGRFTISRDNAKNSVYLQMNSLRAEDTAVYYCYYFRTLSGSSMRYWGQGTLVTVSS

SEQ ID NO: 1471 - protein, 119 aa, synthetic construct
  REGION 1..119: note = Description of Artificial Sequence: Synthetic polypeptide
EVQLVESGGGLVQPGGSLTLSCVASGTTSSINAMGWYRRAPGKQRELVAGISSDGSKVYGDSVKGRFTISRDNAKNSVYLQMNSLRAEDTAVYYCYYFRTVSGSAMRYWGQGTLVTVSS

SEQ ID NO: 1472 - protein, 119 aa, synthetic construct
  REGION 1..119: note = Description of Artificial Sequence: Synthetic polypeptide
EVQLVESGGGLVQPGGSLTLSCVASGSTSSINAMAWYRRAPGKQRELVAGISSDGSKVYTDSVKGRFTISRDNAKNSVYLQMNSLRAEDTAVYYCYYFRTTSGSSMRYWGQGTLVTVSS

SEQ ID NO: 1473 - protein, 119 aa, synthetic construct
  REGION 1..119: note = Description of Artificial Sequence: Synthetic polypeptide
EVQLVESGGGLVQPGGSLTLSCVASGRTSSINAMGWYRRAPGKQRELVAGISSDGSKVYNDSVKGRFTISRDNAKNSVYLQMNSLRAEDTAVYYCYYFRTVSGTSMRYWGQGTLVTVSS

SEQ ID NO: 1474 - protein, 119 aa, synthetic construct
  REGION 1..119: note = Description of Artificial Sequence: Synthetic polypeptide
EVQLVESGGGLVQPGGSLTLSCVASGSTSSRNAMGWYRRAPGKQRELVAGISSDGSKVTADSVKGRFTISRDNAKNSVYLQMNSLRAEDTAVYYCYYFRTRSGSSMRYWGQGTLVTVSS

SEQ ID NO: 1475 - protein, 119 aa, synthetic construct
  REGION 1..119: note = Description of Artificial Sequence: Synthetic polypeptide
EVQLVESGGGLVQPGGSLTLSCVASGSTKSINAMGWYRRAPGKQRELVAGISSDGSKVYRDSVKGRFTISRDNAKNSVYLQMNSLRAEDTAVYYCYYFRTSSGSSMRYWGQGTLVTVSS

SEQ ID NO: 1476 - protein, 119 aa, synthetic construct
  REGION 1..119: note = Description of Artificial Sequence: Synthetic polypeptide
EVQLVESGGGLVQPGGSLTLSCVASGSTSSRNAMGWYRRAPGKQRELVAGISSNGSKVYSDSVKGRFTISRDNAKNSVYLQMNSLRAEDTAVYYCYYFRTVSGSSMSYWGQGTLVTVSS

SEQ ID NO: 1477 - protein, 119 aa, synthetic construct
  REGION 1..119: note = Description of Artificial Sequence: Synthetic polypeptide
EVQLVESGGGLVQPGGSLTLSCVASGSTSSINAIGWYRRAPGKQRELVAGISSDGSKVYSDSVKGRFTISRDNAKNSVYLQMNSLRAEDTAVYYCYYFRPVSGSSMRYWGQGTLVTVSS

SEQ ID NO: 1478 - protein, 119 aa, synthetic construct
  REGION 1..119: note = Description of Artificial Sequence: Synthetic polypeptide
EVQLVESGGGLVQPGGSLTLSCVASGSTSLINAMGWYRRAPGKQRELVAGISSDGSKVYADSVKGRFTISRDNAKNSVYLQMNSLRAEDTAVYYCYYFRHVSGSSMRYWGQGTLVTVSS

SEQ ID NO: 1479 - protein, 119 aa, synthetic construct
  REGION 1..119: note = Description of Artificial Sequence: Synthetic polypeptide
EVQLVESGGGLVQPGGSLTLSCVASGSTSSINAMAWYRRAPGKQRELVAGISSDGSKVYADSVKGRFTISRDNAKNSVYLQMNSLRAEDTAVYYCYYFRTKSGSSMRYWGQGTLVTVSS

SEQ ID NO: 1480 - protein, 119 aa, synthetic construct
  REGION 1..119: note = Description of Artificial Sequence: Synthetic polypeptide
EVQLVESGGGLVQPGGSLTLSCVASGSTSSINAMGWYRRAPGKQRELVAGISSDGSLVYADSVKGRFTISRDNAKNSVYLQMNSLRAEDTAVYYCYYFTTVSGSSMRYWGQGTLVTVSS

SEQ ID NO: 1481 - protein, 119 aa, synthetic construct
  REGION 1..119: note = Description of Artificial Sequence: Synthetic polypeptide
EVQLVESGGGLVQPGGSLTLSCVASGTTSSINAMGWYRRAPGKQRELVAGISSDGTKVYADSVKGRFTISRDNAKNSVYLQMNSLRAEDTAVYYCYYFHTVSGSSMRYWGQGTLVTVSS

SEQ ID NO: 1482 - protein, 119 aa, synthetic construct
  REGION 1..119: note = Description of Artificial Sequence: Synthetic polypeptide
EVQLVESGGGLVQPGGSLTLSCVASGSTSSINAFGWYRRAPGKQRELVAGISSDGSKVYADSVKGRFTISRDNAKNSVYLQMNSLRAEDTAVYYCYYFRTVRGSSMRYWGQGTLVTVSS

SEQ ID NO: 1483 - protein, 119 aa, synthetic construct
  REGION 1..119: note = Description of Artificial Sequence: Synthetic polypeptide
EVQLVESGGGLVQPGGSLTLSCVASGSTSSRNAMGWYRRAPGKQRELVAGISSDGSKLYLDSVKGRFTISRDNAKNSVYLQMNSLRAEDTAVYYCYYFRTVLGSSMRYWGQGTLVTVSS

SEQ ID NO: 1484 - protein, 119 aa, synthetic construct
  REGION 1..119: note = Description of Artificial Sequence: Synthetic polypeptide
EVQLVESGGGLVQPGGSLTLSCVASGNTSSINAMGWYRRAPGKQRELVAGISSDGSRVYADSVKGRFTISRDNAKNSVYLQMNSLRAEDTAVYYCYYFRTVSGSSMRSWGQGTLVTVSS

SEQ ID NO: 1485 - protein, 119 aa, synthetic construct
  REGION 1..119: note = Description of Artificial Sequence: Synthetic polypeptide
EVQLVESGGGLVQPGGSLTLSCVASGTTSSINAMGWYRRAPGKQRELVAGISSDGSKVYNDSVKGRFTISRDNAKNSVYLQMNSLRAEDTAVYYCYYFRTVRGSSMRYWGQGTLVTVSS

SEQ ID NO: 1486 - protein, 119 aa, synthetic construct
  REGION 1..119: note = Description of Artificial Sequence: Synthetic polypeptide
EVQLVESGGGLVQPGGSLTLSCVASGSTASINAMGWYRRAPGKQRELVAGISSDGSKVYADSVKGRFTISRDNAKNSVYLQMNSLRAEDTAVYYCYYFRYVSGSSMRYWGQGTLVTVSS

SEQ ID NO: 1487 - protein, 119 aa, synthetic construct
  REGION 1..119: note = Description of Artificial Sequence: Synthetic polypeptide
EVQLVESGGGLVQPGGSLTLSCVASGSTSSINAVGWYRRAPGKQRELVAGISSDGSKVYVDSVKGRFTISRDNAKNSVYLQMNSLRAEDTAVYYCYYFRTVYGSSMRYWGQGTLVTVSS

SEQ ID NO: 1488 - protein, 119 aa, synthetic construct
  REGION 1..119: note = Description of Artificial Sequence: Synthetic polypeptide
EVQLVESGGGLVQPGGSLTLSCVASGSTSSRNAMGWYRRAPGKQRELVAGISSDGSKLYADSVKGRFTISRDNAKNSVYLQMNSLRAEDTAVYYCYYFRTVLGSSMRYWGQGTLVTVSS

SEQ ID NO: 1489 - protein, 119 aa, synthetic construct
  REGION 1..119: note = Description of Artificial Sequence: Synthetic polypeptide
EVQLVESGGGLVQPGGSLTLSCVASGSTNSINAMGWYRRAPGKQRELVAGISSDGSKVYKDSVKGRFTISRDNAKNSVYLQMNSLRAEDTAVYYCYYYRTVSGSSMRYWGQGTLVTVSS

SEQ ID NO: 1490 - protein, 119 aa, synthetic construct
  REGION 1..119: note = Description of Artificial Sequence: Synthetic polypeptide
EVQLVESGGGLVQPGGSLTLSCVASGSTSSINAMAWYRRAPGKQRELVAGISSDGSKVYADSVKGRFTISRDNAKNSVYLQMNSLRAEDTAVYYCYYFRSVSGSSMRYWGQGTLVTVSS

SEQ ID NO: 1491 - protein, 119 aa, synthetic construct
  REGION 1..119: note = Description of Artificial Sequence: Synthetic polypeptide
EVQLVESGGGLVQPGGSLTLSCVASGSTSRINAMGWYRRAPGKQRELVAGISSDGSKVYQDSVKGRFTISRDNAKNSVYLQMNSLRAEDTAVYYCYYFRRVSGSSMRYWGQGTLVTVSS

SEQ ID NO: 1492 - protein, 119 aa, synthetic construct
  REGION 1..119: note = Description of Artificial Sequence: Synthetic polypeptide
EVQLVESGGGLVQPGGSLTLSCVPSGSTSNINAMGWYRRAPGKQRELPAGISSDGTKIYADSAKVPFTITRDNAKNSVYLQMNSLRAEDTAVYYCYYFRTVSGTSMRYWGQGTLVTVSS

SEQ ID NO: 1493 - protein, 119 aa, synthetic construct
  REGION 1..119: note = Description of Artificial Sequence: Synthetic polypeptide
EVQLVESGGGLVQPGGSLTLSCVASGSTSKINAMGWYRRAPGKQRELVAGISSDRSKVYADSVKGRFTISRDNAKNSVYLQMNSLRAEDTAVYYCYYFRTVAGSSMRYWGQGTLVTVSS

SEQ ID NO: 1494 - protein, 119 aa, synthetic construct
  REGION 1..119: note = Description of Artificial Sequence: Synthetic polypeptide
EVQLVESGGGLVQPGGSLTLSCVASGSTSSINALGWYRRAPGKQRELVAGISSDGSLVYADSVKGRFTISRDNAKNSVYLQMNSLRAEDTAVYYCYYFRIVSGSSMRYWGQGTLVTVSS

SEQ ID NO: 1495 - protein, 119 aa, synthetic construct
  REGION 1..119: note = Description of Artificial Sequence: Synthetic polypeptide
EVQLVESGGGLVQPGGSLTLSCVASGKTSSINAMGWYRRAPGKQRELVAGISSDGSKVYADSVKGRFTISRDNAKNSVYLQMNSLRAEDTAVYYCYYFRTVSGVSMRYWGQGTLVTVSS

SEQ ID NO: 1496 - protein, 119 aa, synthetic construct
  REGION 1..119: note = Description of Artificial Sequence: Synthetic polypeptide
EVQLVESGGGLVQPGGSLTLSCVASGSTSSINAVGWYRRAPGKQRELVAGISSDGSKVYRDSVKGRFTISRDNAKNSVYLQMNSLRAEDTAVYYCYYFRTVQGSSMRYWGQGTLVTVSS

SEQ ID NO: 1497 - protein, 119 aa, synthetic construct
  REGION 1..119: note = Description of Artificial Sequence: Synthetic polypeptide
EVQLVESGGGLVQPGGSLTLSCVASGSTSRINAMGWYRRAPGKQRELVAGISSDGSKVYADSVKGRFTISRDNAKNSVYLQMNSLRAEDTAVYYCYYFRTASGSSMRYWGQGTLVTVSS

SEQ ID NO: 1498 - protein, 119 aa, synthetic construct
  REGION 1..119: note = Description of Artificial Sequence: Synthetic polypeptide
EVQLVESGGGLVQPGGSLTLSCVASGSTSSINAMGWYRRAPGKQRELVAGISSDGSKVYSDSVKGRFTISRDNAKNSVYLQMNSLRAEDTAVYYCYYFRTVSGSSSRYWGQGTLVTVSS

SEQ ID NO: 1499 - protein, 119 aa, synthetic construct
  REGION 1..119: note = Description of Artificial Sequence: Synthetic polypeptide
EVQLVESGGGLVQPGGSLTLSCVASGSTSSINAVGWYRRAPGKQRELVAGISSDGTKVYRDSVKGRFTISRDNAKNSVYLQMNSLRAEDTAVYYCYYFRTVQGSSMRYWGQGTLVTVSS

SEQ ID NO: 1500 - protein, 119 aa, synthetic construct
  REGION 1..119: note = Description of Artificial Sequence: Synthetic polypeptide
EVQLVESGGGLVQPGGSLTLSCVASGTTSSINAMGWYRRAPGKQRELAAGISSDGSKVYNDSVKGRFTISRDNAKNSVYLQMNSLRAEDTAVYYCYYFRTVRGSSMRYWGQGTLVTVSS

SEQ ID NO: 1501 - protein, 119 aa, synthetic construct
  REGION 1..119: note = Description of Artificial Sequence: Synthetic polypeptide
EVQLVESGGGLVQPGGSLTLSCVASGSTSSINAMGWYRRAPGKQRELVAGISSDGSKVYADSVKGRFTISRDNAKNSVYLQMNSLRAEDTAVYYCYYFRTKSGSSMRYWGQGTLVTVSS

SEQ ID NO: 1502 - protein, 119 aa, synthetic construct
  REGION 1..119: note = Description of Artificial Sequence: Synthetic polypeptide
EVQLVESGGGLVQPGGSLTLSCVASGTTSSINAMGWYRRAPGKQRELVAGISSDGSKVYADSVKGRFTISRDNAKNSVYLQMNSLRAEDTAVYYCYYFRTVWGSSMRYWGQGTLVTVSS

SEQ ID NO: 1503 - protein, 119 aa, synthetic construct
  REGION 1..119: note = Description of Artificial Sequence: Synthetic polypeptide
EVQLVESGGGLVQPGGSLTLSCVASGKTSSINAMGWYRRAPGKQRELVAGISSDGSKVYTDSVKGRFTISRDNAKNSVYLQMNSLRAEDTAVYYCYYFRTRSGSSMRYWGQGTLVTVSS

SEQ ID NO: 1504 - protein, 119 aa, synthetic construct
  REGION 1..119: note = Description of Artificial Sequence: Synthetic polypeptide
EVQLVESGGGLVQPGGSLTLSCVASGSTSSINAMGWYRRAPFKQGELPAGISPDGTKAYADSAKVRFTISRDNAKNSVYLQMNSLRAEDTAVYYCYYFHTVCGTSMGYWGQGTLVTVSS

SEQ ID NO: 1505 - protein, 119 aa, synthetic construct
  REGION 1..119: note = Description of Artificial Sequence: Synthetic polypeptide
EVQLVESGGGLVQPGGSLTLSCVASGSTSAINAMGWYRRAPGKQRELVAGISSDGSKVYVDSVKGRFTISRDNAKNSVYLQMNSLRAEDTAVYYCYYFRTVSGSSQRYWGQGTLVTVSS

SEQ ID NO: 1506 - protein, 119 aa, synthetic construct
  REGION 1..119: note = Description of Artificial Sequence: Synthetic polypeptide
EVQLVESGGGLVQPGGSLTLSCVASGSPSSINAYGWYRRAPGKQRELVAGISSDGSKVYSDSVKGRFTISRDNAKNSVYLQMNSLRAEDTAVYYCYYFRTVSGSSMSYWGQGTLVTVSS

SEQ ID NO: 1507 - protein, 119 aa, synthetic construct
  REGION 1..119: note = Description of Artificial Sequence: Synthetic polypeptide
EVQLVESGGGLVQPGGSLTLSCVASGSTSSINAMGWYRRAPGKQRELVAGISSDGSKVYASSVKGRFTISRDNAKNSVYLQMNSLRAEDTAVYYCYYFRTVRGSSMRYWGQGTLVTVSS

SEQ ID NO: 1508 - protein, 119 aa, synthetic construct
  REGION 1..119: note = Description of Artificial Sequence: Synthetic polypeptide
EVQLVESGGGLVQPGGSLTLSCVASGSRSSINAMGWYRRAPGKQRELVAGISADGSKVYADSVKGRFTISRDNAKNSVYLQMNSLRAEDTAVYYCYYFRTQSGSSMRYWGQGTLVTVSS

SEQ ID NO: 1509 - protein, 119 aa, synthetic construct
  REGION 1..119: note = Description of Artificial Sequence: Synthetic polypeptide
EVQLVESGGGLVQPGGSLTLSCVASGSVSSINAMGWYRRAPGKQRELVAGISSDGSKVYASSAKGRFTISRDNAKNSVYLQMNSLRAEDTAVYYCYYFRTLSGSSMRYWGQGTLVTVSS

SEQ ID NO: 1510 - protein, 119 aa, synthetic construct
  REGION 1..119: note = Description of Artificial Sequence: Synthetic polypeptide
EVQLVESGGGLVQPGGSLTLSCVASGSTSSINAMAWYRRAPGKQRELVAGISSDGSKVYADSVKGRFTISRDNAKNSVYLQMNSLRAEDTAVYYCYYFHTVSGSSMRYWGQGTLVTVSS

SEQ ID NO: 1511 - protein, 119 aa, synthetic construct
  REGION 1..119: note = Description of Artificial Sequence: Synthetic polypeptide
EVQLVESGGGLVQPGGSLTLSCVASGSTSSINAIGWYRRAPGKQRELVAGISSDGSSVYADSVKGRFTISRDNAKNSVYLQMNSLRAEDTAVYYCYYFRRVSGSSMRYWGQGTLVTVSS

SEQ ID NO: 1512 - protein, 119 aa, synthetic construct
  REGION 1..119: note = Description of Artificial Sequence: Synthetic polypeptide
EVQLVESGGGLVQPGGSLTLSCVASGSTSSINAMGWYRRAPGKQRELVAGISSDGSKVYSDSVKGRFTISRDNAKNSVYLQMNSLRAEDTAVYYCYYFRLVSGSSMRYWGQGTLVTVSS

SEQ ID NO: 1513 - protein, 119 aa, synthetic construct
  REGION 1..119: note = Description of Artificial Sequence: Synthetic polypeptide
EVQLVESGGGLVQPGGSLTLSCVASGSTSSINAVGWYRRAPGKQRELVAGISSDGSKVYAGSVKGRFTISRDNAKNSVYLQMNSLRAEDTAVYYCYYFRTVSGSYMRYWGQGTLVTVSS

SEQ ID NO: 1514 - protein, 119 aa, synthetic construct
  REGION 1..119: note = Description of Artificial Sequence: Synthetic polypeptide
EVQLVESGGGLVQPGGSLTLSCVASGSTSSINAMAWYRRAPGKQRELAAGISSDNSKVYADSVKGRFTISRDNAKNSVYLQMNSLRAEDTAVYYCYYFRTVGGSSMRYWGQGTLVTVSS

SEQ ID NO: 1515 - protein, 119 aa, synthetic construct
  REGION 1..119: note = Description of Artificial Sequence: Synthetic polypeptide
EVQLVESGGGLVQPGGSLTLSCVASGSTSSINAYGWYRRAPGKQRELVAGISSDGSAVYADSVKGRFTISRDNAKNSVYLQMNSLRAEDTAVYYCYYFRTHSGSSMRYWGQGTLVTVSS

SEQ ID NO: 1516 - protein, 119 aa, synthetic construct
  REGION 1..119: note = Description of Artificial Sequence: Synthetic polypeptide
EVQLVESGGGLVQPGGSLTLSCVASGSTSSINAVGWYRRAPGKQRELVAGISSDGSSVYADSVKGRFTISRDNAKNSVYLQMNSLRAEDTAVYYCYYFRTVSTSSMRYWGQGTLVTVSS

SEQ ID NO: 1517 - protein, 119 aa, synthetic construct
  REGION 1..119: note = Description of Artificial Sequence: Synthetic polypeptide
EVQLVESGGGLVQPGGSLTLSCVASGSKSSINAMGWYRRAPGKQRELPAGISSNGTKVYADSAKVRFTISRDNAKNSVYLQMNSLRAEDTAVYYCYYFRTVLGTSMRYWGQGTLVTVSS

SEQ ID NO: 1518 - protein, 119 aa, synthetic construct
  REGION 1..119: note = Description of Artificial Sequence: Synthetic polypeptide
EVQLVESGGGLVQPGGSLTLSCVASGSTSSINAMAWYRRAPGKQRELVAGISSDGSKLYADSVKGRFTISRDNAKNSVYLQMNSLRAEDTAVYYCYYFRTVSGSSMRYWGQGTLVTVSS

SEQ ID NO: 1519 - protein, 119 aa, synthetic construct
  REGION 1..119: note = Description of Artificial Sequence: Synthetic polypeptide
EVQLVESGGGLVQPGGSLTLSCVASGSVSSINAMGWYRRAPGKQRELVAGISSDGSKVYKDSVKGRFTISRDNAKNSVYLQMNSLRAEDTAVYYCYYFRTVSGSSMGYWGQGTLVTVSS

SEQ ID NO: 1520 - protein, 119 aa, synthetic construct
  REGION 1..119: note = Description of Artificial Sequence: Synthetic polypeptide
EVQLVESGGGLVQPGGSLTLSCVASGSTSSINAMGWYRRAPGKQRELVAGISSDGSLVYADSVKGRFTISRDNAKNSVYLQMNSLRAEDTAVYYCYYFRTVSGSSMRAWGQGTLVTVSS

SEQ ID NO: 1521 - protein, 119 aa, synthetic construct
  REGION 1..119: note = Description of Artificial Sequence: Synthetic polypeptide
EVQLVESGGGLVQPGGSLTLSCVASGSTSSINAMGWYRRAPGKQRELVAGISSDGSLVYADSVKGRFTISRDNAKNSVYLQMNSLRAEDTAVYYCYYFRILSGSSMRYWGQGTLVTVSS

SEQ ID NO: 1522 - protein, 119 aa, synthetic construct
  REGION 1..119: note = Description of Artificial Sequence: Synthetic polypeptide
EVQLVESGGGLVQPGGSLTLSCVASGSTSSINAMAWYRRAPGKQRELVAGISSDGSKVYADSVKGRFTISRDNAKNSVYLQMNSLRAEDTAVYYCYYFRTVQGSSMRYWGQGTLVTVSS

SEQ ID NO: 1523 - protein, 119 aa, synthetic construct
  REGION 1..119: note = Description of Artificial Sequence: Synthetic polypeptide
EVQLVESGGGLVQPGGSLTLSCVASGSTSYINAMGWYRRAPGKQRELVAGISSDGSKVYADSVKGRFTISRDNAKNSVYLQMNSLRAEDTAVYYCYYFRTVSGQSMGYWGQGTLVTVSS

SEQ ID NO: 1524 - protein, 119 aa, synthetic construct
  REGION 1..119: note = Description of Artificial Sequence: Synthetic polypeptide
EVQLVESGGGLVQPGGSLTLSCVASGSTSSINAMGWYRRAPGKQRELVAGVSSDGSKVYADSVKGRFTISRDNAKNSVYLQMNSLRAEDTAVYYCYYFRTVSGSSARYWGQGTLVTVSS

SEQ ID NO: 1525 - protein, 119 aa, synthetic construct
  REGION 1..119: note = Description of Artificial Sequence: Synthetic polypeptide
EVQLVESGGGLVQPGGSLTLSCVASGSTSSINAMGWYRRAPGKQRELPAGISRDGSKVYADSVKGRFTISRDNAKNSVYLQMNSLRAEDTAVYYCYYFRYVSGSSMRYWGQGTLVTVSS

SEQ ID NO: 1526 - protein, 119 aa, synthetic construct
  REGION 1..119: note = Description of Artificial Sequence: Synthetic polypeptide
EVQLVESGGGLVQPGGSLTLSCVASGSTSSINAMGWYRRAPGKQRELAAGISSDGSKLYADSVKGRFTISRDNAKNSVYLQMNSLRAEDTAVYYCYYFRTVSGSSMRYWGQGTLVTVSS

SEQ ID NO: 1527 - protein, 119 aa, synthetic construct
  REGION 1..119: note = Description of Artificial Sequence: Synthetic polypeptide
EVQLVESGGGLVQPGGSLTLSCVASGSTSRINAMGWYRRAPGKQRELVAGISSDGSKVYADSVKGRFTISRDNAKNSVYLQMNSLRAEDTAVYYCYYFRRVSGSSMRYWGQGTLVTVSS

SEQ ID NO: 1528 - protein, 119 aa, synthetic construct
  REGION 1..119: note = Description of Artificial Sequence: Synthetic polypeptide
EVQLVESGGGLVQPGGSLTLSCVASGSTSSINAMAWYRRAPGKQRELAAGISSDGSKVYADSVKGRFTISRDNAKNSVYLQMNSLRAEDTAVYYCYYFHTVSGSSMRYWGQGTLVTVSS

SEQ ID NO: 1529 - protein, 119 aa, synthetic construct
  REGION 1..119: note = Description of Artificial Sequence: Synthetic polypeptide
EVQLVESGGGLVQPGGSLTLSCVASGSTSSINAMAWYRRAPGKQRELVAGISSDGSKVYADSVKGRFTISRDNAKNSVYLQMNSLRAEDTAVYYCYYFRQVSGSSMRYWGQGTLVTVSS

SEQ ID NO: 1530 - protein, 119 aa, synthetic construct
  REGION 1..119: note = Description of Artificial Sequence: Synthetic polypeptide
EVQLVESGGGLVQPGGSLTLSCVASGSTSSINAMGWYRRAPGKQRELVAGISSDTSKVYADSVKGRFTISRDNAKNSVYLQMNSLRAEDTAVYYCYYFRTVSGSYMRYWGQGTLVTVSS

SEQ ID NO: 1531 - protein, 119 aa, synthetic construct
  REGION 1..119: note = Description of Artificial Sequence: Synthetic polypeptide
EVQLVESGGGLVQPGGSLTLSCVASGSTSTINAMGWYRRAPGKQRELVAGISSDGSKVYADSVKGRFTISRDNAKNSVYLQMNSLRAEDTAVYYCYYFRTASGSSMRYWGQGTLVTVSS

SEQ ID NO: 1532 - protein, 119 aa, synthetic construct
  REGION 1..119: note = Description of Artificial Sequence: Synthetic polypeptide
EVQLVESGGGLVQPGGSLTLSCVASGSTSSINAVGWYRRAPGKQRELVAGISSDGSTVYADSVKGRFTISRDNAKNSVYLQMNSLRAEDTAVYYCYYFRTVSGHSMRYWGQGTLVTVSS

SEQ ID NO: 1533 - protein, 119 aa, synthetic construct
  REGION 1..119: note = Description of Artificial Sequence: Synthetic polypeptide
EVQLVESGGGLVQPGGSLTLSCVASGSTSSINAMGWYRRAPGKQRELAAGISKDGSKVYADSAKGRFTISRDNAKNSVYLQMNSLRAEDTAVYYCYYFRTVSGSSSRYWGQGTLVTVSS

SEQ ID NO: 1534 - protein, 119 aa, synthetic construct
  REGION 1..119: note = Description of Artificial Sequence: Synthetic polypeptide
EVQLVESGGGLVQPGGSLTLSCVASGSPSSINAYGWYRRAPGKQRELVAGISSDGSKVYSDSVKGRFTISRDNAKNSVYLQMNSLRAEDTAVYYCYYFRTVSGSSYSYWGQGTLVTVSS

SEQ ID NO: 1535 - protein, 119 aa, synthetic construct
  REGION 1..119: note = Description of Artificial Sequence: Synthetic polypeptide
EVQLVESGGGLVQPGGSLTLSCVASGSPSSINAYGWYRRAPGKQRELVAGISSDGSKVYSDSVKGRFTISRDNAKNSVYLQMNSLRAEDTAVYYCYYFRTVSGSSQSYWGQGTLVTVSS

SEQ ID NO: 1536 - protein, 117 aa, synthetic construct
  REGION 1..117: note = Description of Artificial Sequence: Synthetic polypeptide
EVQLVESGGGLVQPGGSLTLSCAASGSSVKFLSMAWYRQAPGKKRELVAGISADGSTDYIDSVKGRFTISRDNAKNSVYLQMNSLRAEDTAVYYCYAYRWTRRYTYWGQGTLVTVSS

SEQ ID NO: 1537 - protein, 117 aa, synthetic construct
  REGION 1..117: note = Description of Artificial Sequence: Synthetic polypeptide
EVQLVESGGGLVQPGGSLTLSCAASGSSVSFLSLAWYRQAPGKKRELVAGISADGSTAYIDSVKGRFTISRDNAKNSVYLQMNSLRAEDTAVYYCYAYRWRTRYTYWGQGTLVTVSS

SEQ ID NO: 1538 - protein, 117 aa, synthetic construct
  REGION 1..117: note = Description of Artificial Sequence: Synthetic polypeptide
EVQLVESGGGLVQPGGSLTLSCAASGSRVSFLSMAWYRQAPGKKRELVAGISRDGSTDYIDSVKGRFTISRDNAKNSVYLQMNSLRAEDTAVYYCYAYRWTTRRTYWGQGTLVTVSS

SEQ ID NO: 1539 - protein, 117 aa, synthetic construct
  REGION 1..117: note = Description of Artificial Sequence: Synthetic polypeptide
EVQLVESGGGLVQPGGSLTLSCAASGSQVSFLSMAWYRQAPGKKRELVAGISRDGSTDYIDSVKGRFTISRDNAKNSVYLQMNSLRAEDTAVYYCYAYRWTTRYIYWGQGTLVTVSS

SEQ ID NO: 1540 - protein, 117 aa, synthetic construct
  REGION 1..117: note = Description of Artificial Sequence: Synthetic polypeptide
EVQLVESGGGLVQPGGSLTLSCAASGSSVSFLSMAWYRQAPGKKRELVAGISEAGSTDYIDSVKGRFTISRDNAKNSVYLQMNSLRAEDTAVYYCYAYRWRTRYTYWGQGTLVTVSS

SEQ ID NO: 1541 - protein, 117 aa, synthetic construct
  REGION 1..117: note = Description of Artificial Sequence: Synthetic polypeptide
EVQLVESGGGLVQPGGSLTLRCAASGSKVSFLSMAWYRQAPGKKRELVAGISADGSTDYVDSVKGRFTISRDNAKNSVYLQMNSLRAEDTAVYYCYAYRWTRRYTYWGQGTLVTVSS

SEQ ID NO: 1542 - protein, 117 aa, synthetic construct
  REGION 1..117: note = Description of Artificial Sequence: Synthetic polypeptide
EVQLVESGGGLVQPGGSLTLSCAASGSSVGFLSMAWYRQAPGKKRELVAGISADGSTDYIRSVKGRFTISRDNAKNSVYLQMNSLRAEDTAVYYCYAYRWRTRYTYWGQGTLVTVSS

SEQ ID NO: 1543 - protein, 117 aa, synthetic construct
  REGION 1..117: note = Description of Artificial Sequence: Synthetic polypeptide
EVQLVESGGGLVQPGGSLTLSCAASGSSVSFLSMAWYRQAPGKKRELVAGISADGSVDYIDSVKGRFTISRDNAKNSVYLQMNSLRAEDTAVYYCYAYRWTTRYIYWGQGTLVTVSS

SEQ ID NO: 1544 - protein, 117 aa, synthetic construct
  REGION 1..117: note = Description of Artificial Sequence: Synthetic polypeptide
EVQLVESGGGLVQPGGSLTLSCAASGSRVSFLSMAWYRQAPGKKRELVAGISADGSTLYIDSVKGRFTISRDNAKNSVYLQMNSLRAEDTAVYYCYAYRWTTRRTYWGQGTLVTVSS

SEQ ID NO: 1545 - protein, 117 aa, synthetic construct
  REGION 1..117: note = Description of Artificial Sequence: Synthetic polypeptide
EVQLVESGGGLVQPGGSLTLSCAASGSSVSFLSLAWYRQAPGKKRELVAGISTDGSTDYIDSVKGRFTISRDNAKNSVYLQMNSLRAEDTAVYYCYAYRWRTRYTYWGQGTLVTVSS

SEQ ID NO: 1546 - protein, 117 aa, synthetic construct
  REGION 1..117: note = Description of Artificial Sequence: Synthetic polypeptide
EVQLVESGGGLVQPGGSLTLSCAASGSSVSFLSMAWYRQAPGKKRELVAGISGDGSTDYIDSVKGRFTISRDNAKNSVYLQMNSLRAEDTAVYYCYAYRWTTRYTYWGQGTLVTVSS

SEQ ID NO: 1547 - protein, 117 aa, synthetic construct
  REGION 1..117: note = Description of Artificial Sequence: Synthetic polypeptide
EVQLVESGGGLVQPGGSLTLSCAASGSSVQFLSMAWYRQAPGKKRELVAGISADGSTDYINSVKGRFTISRDNAKNSVYLQMNSLRAEDTAVYYCYAYRWRTRYTYWGQGTLVTVSS

SEQ ID NO: 1548 - protein, 117 aa, synthetic construct
  REGION 1..117: note = Description of Artificial Sequence: Synthetic polypeptide
EVQLVESGGGLVQPGGSLTLSCAASGSNVSFLSMAWYRQAPGKKRELVAGISARGSTDYIDSVKGRFTISRDNAKNSVYLQMNSLRAEDTAVYYCYAYHWTTRYTYWGQGTLVTVSS

SEQ ID NO: 1549 - protein, 117 aa, synthetic construct
  REGION 1..117: note = Description of Artificial Sequence: Synthetic polypeptide
EVQLVESGGGLVQPGGSLTLSCVASGSSVKFLSMAWYRQAPGKKRELVAGISADGSTTYIDSVKGRFTISRDNAKNSVYLQMNSLRAEDTAVYYCYAYRWTTRRTYWGQGTLVTVSS

SEQ ID NO: 1550 - protein, 117 aa, synthetic construct
  REGION 1..117: note = Description of Artificial Sequence: Synthetic polypeptide
EVQLVESGGGLVQPGGSLTLSCAASGKSVSFLSMAWYRQAPGKKRELVAGISKDGSTDYIDSVKGRFTISRDNAKNSVYLQMNSLRAEDTAVYYCYAYRWTTRYTYWGQGTLVTVSS

SEQ ID NO: 1551 - protein, 117 aa, synthetic construct
  REGION 1..117: note = Description of Artificial Sequence: Synthetic polypeptide
EVQLVESGGGLVQPGGSLTLSCAASGSRVSFLSMAWYRQAPGKKRELVAGISADGSTTYIDSVKGRFTISRDNAKNSVYLQMNSLRAEDTAVYYCYAYRWTTRYTYWGQGTLVTVSS

SEQ ID NO: 1552 - protein, 117 aa, synthetic construct
  REGION 1..117: note = Description of Artificial Sequence: Synthetic polypeptide
EVQLVESGGGLVQPGGSLTLSCAASGSHVSFLSMAWYRQAPGKKRELVAGISANGSTDYIDSVKGRFTISRDNAKNSVYLQMNSLRAEDTAVYYCYAYRWTTRYAYWGQGTLVTVSS

SEQ ID NO: 1553 - protein, 117 aa, synthetic construct
  REGION 1..117: note = Description of Artificial Sequence: Synthetic polypeptide
EVQLVESGGGLVQPGGSLTLSCAASGSSVSFLSMAWYRQAPGKKRELVAGISRDGSTDYIDSVKGRFTISRDNAKNSVYLQMNSLRAEDTAVYYCYAYRWVTRYTYWGQGTLVTVSS

SEQ ID NO: 1554 - protein, 117 aa, synthetic construct
  REGION 1..117: note = Description of Artificial Sequence: Synthetic polypeptide
EVQLVESGGGLVQPGGSLTLSCAASGSSVSFLSMAWYRQAPGKKRELVAGISADGSADYIDSVKGRFTISRDNAKNSVYLQMNSLRAEDTAVYYCYAYRWVTRYTYWGQGTLVTVSS

SEQ ID NO: 1555 - protein, 117 aa, synthetic construct
  REGION 1..117: note = Description of Artificial Sequence: Synthetic polypeptide
EVQLVESGGGLVQPGGSLTLSCAASGSSVRFLSMAWYRQAPGKKRELVAGISAHGSTDYIDSVKGRFTISRDNAKNSVYLQMNSLRAEDTAVYYCYAYRWSTRYTYWGQGTLVTVSS

SEQ ID NO: 1556 - protein, 117 aa, synthetic construct
  REGION 1..117: note = Description of Artificial Sequence: Synthetic polypeptide
EVQLVESGGGLVQPGGSLTLSCAASGSSVRFLSMAWYRQAPGKKRELVAGISADGSTIYIDSVKGRFTISRDNAKNSVYLQMNSLRAEDTAVYYCYAYRWRTRYTYWGQGTLVTVSS

SEQ ID NO: 1557 - protein, 117 aa, synthetic construct
  REGION 1..117: note = Description of Artificial Sequence: Synthetic polypeptide
EVQLVESGGGLVQPGGSLTLSCAASGSSVRFLSMAWYRQAPGKKRELVAGISRDGSTVYIDSVKGRFTISRDNAKNSVYLQMNSLRAEDTAVYYCYAYRWTTRGTYWGQGTLVTVSS

SEQ ID NO: 1558 - protein, 117 aa, synthetic construct
  REGION 1..117: note = Description of Artificial Sequence: Synthetic polypeptide
EVQLVESGGGLVQPGGSLTLSCAASGSHVSFLSMAWYRQAPGKKRELVAGISADGPTDYIDSVKGRFTISRDNAKNSVYLQMNSLRAEDTAVYYCYAYRWDTRYTYWGQGTLVTVSS

SEQ ID NO: 1559 - protein, 117 aa, synthetic construct
  REGION 1..117: note = Description of Artificial Sequence: Synthetic polypeptide
EVQLVESGGGLVQPGGSLTLSCVASGTSVSFLSMAWYRQAPGKKRELVAGISADGSTTYIDSVKGRFTISRDNAKNSVYLQMNSLRAEDTAVYYCYAYRWTTRRTYWGQGTLVTVSS

SEQ ID NO: 1560 - protein, 117 aa, synthetic construct
  REGION 1..117: note = Description of Artificial Sequence: Synthetic polypeptide
EVQLVESGGGLVQPGGSLTLSCAASGTSVSFLSIAWYRQAPGKKRELVAGISADGSTDYIASVKGRFTISRDNAKNSVYLQMNSLRAEDTAVYYCYAYRWRTRYTYWGQGTLVTVSS

SEQ ID NO: 1561 - protein, 117 aa, synthetic construct
  REGION 1..117: note = Description of Artificial Sequence: Synthetic polypeptide
EVQLVESGGGLVQPGGSLTLSCAASGSSVKFLSMAWYRQAPGKKRELVAGISLDGSTDYIDSVKGRFTISRDNAKNSVYLQMNSLRAEDTAVYYCYAYRWTGRYTYWGQGTLVTVSS

SEQ ID NO: 1562 - protein, 117 aa, synthetic construct
  REGION 1..117: note = Description of Artificial Sequence: Synthetic polypeptide
EVQLVESGGGLVQPGGSLTLSCAASGSSVSFLSMAWYRQAPGKKRELVAGISADGSTIYIDSVKGRFTISRDNAKNSVYLQMNSLRAEDTAVYYCYAYRWRTRYTYWGQGTLVTVSS

SEQ ID NO: 1563 - protein, 117 aa, synthetic construct
  REGION 1..117: note = Description of Artificial Sequence: Synthetic polypeptide
EVQLVESGGGLVQPGGSLTLSCAASGSSVRFLSMAWYRQAPGKKRELVAGISAHGSTDYIDSVKGRFTISRDNAKNSVYLQMNSLRAEDTAVYYCYAYRWRTRYTYWGQGTLVTVSS

SEQ ID NO: 1564 - protein, 117 aa, synthetic construct
  REGION 1..117: note = Description of Artificial Sequence: Synthetic polypeptide
EVQLVESGGGLVQPGGSLTLSCAASGSSVSFLSMAWYRQAPGKKRELVAGISRDGSTDYIDSVKGRFTISRDNAKNSVYLQMNSLRAEDTAVYYCYAYRWITRYTYWGQGTLVTVSS

SEQ ID NO: 1565 - protein, 117 aa, synthetic construct
  REGION 1..117: note = Description of Artificial Sequence: Synthetic polypeptide
EVQLVESGGGLVQPGGSLTLSCAASGSSVRFLSMAWYRQAPGKKRELVAGISRDGSTDYIDSVKGRFTISRDNAKNSVYLQMNSLRAEDTAVYYCYAYRWITRYTYWGQGTLVTVSS

SEQ ID NO: 1566 - protein, 117 aa, synthetic construct
  REGION 1..117: note = Description of Artificial Sequence: Synthetic polypeptide
EVQLVESGGGLVQPGGSLTLSCAASGSSVVFLSMAWYRQAPGKKRELVAGISADGSMDYIDSVKGRFTISRDNAKNSVYLQMNSLRAEDTAVYYCYAYRWRTRYTYWGQGTLVTVSS

SEQ ID NO: 1567 - protein, 117 aa, synthetic construct
  REGION 1..117: note = Description of Artificial Sequence: Synthetic polypeptide
EVQLVESGGGLVQPGGSLTLSCAASGSSVRFLSMAWYRQAPGKKRELVAGISADGSTDYIDSVKGRFTISRDNAKNSVYLQMNSLRAEDTAVYYCYAYRWTRRYTYWGQGTLVTVSS

SEQ ID NO: 1568 - protein, 117 aa, synthetic construct
  REGION 1..117: note = Description of Artificial Sequence: Synthetic polypeptide
EVQLVESGGGLVQPGGSLTLSCAASGSSVRFLSMAWYRQAPGKKRELVAGISADGSTDYIDSVKGRFTISRDNAKNSVYLQMNSLRAEDTAVYYCYAYSWTTRYTYWGQGTLVTVSS

SEQ ID NO: 1569 - protein, 117 aa, synthetic construct
  REGION 1..117: note = Description of Artificial Sequence: Synthetic polypeptide
EVQLVESGGGLVQPGGSLTLSCAASGSSVRFLSMAWYRQAPGKKRELVAGISANGSTDYIDSVKGRFTISRDNAKNSVYLQMNSLRAEDTAVYYCYAYRWTNRYTYWGQGTLVTVSS

SEQ ID NO: 1570 - protein, 117 aa, synthetic construct
  REGION 1..117: note = Description of Artificial Sequence: Synthetic polypeptide
EVQLVESGGGLVQPGGSLTLSCAASGSSVSRLSMAWYRQAPGKKRELVAGISANGSTTYIDSVKGRFTISRDNAKNSVYLQMNSLRAEDTAVYYCYAYRWTTRYRYWGQGTLVTVSS

SEQ ID NO: 1571 - protein, 117 aa, synthetic construct
  REGION 1..117: note = Description of Artificial Sequence: Synthetic polypeptide
EVQLVESGGGLVQPGGSLTLSCAASGSSKSFLSMAWYRQAPGKKRELVAGISADGSTSYIDSVKGRFTISRDNAKNSVYLQMNSLRAEDTAVYYCYAYRWTTRYTYWGQGTLVTVSS

SEQ ID NO: 1572 - protein, 117 aa, synthetic construct
  REGION 1..117: note = Description of Artificial Sequence: Synthetic polypeptide
EVQLVESGGGLVQPGGSLTLSCAASGSSVSRLSMAWYRQAPGKKRELVAGISADGSRDYIDSVKGRFTISRDNAKNSVYLQMNSLRAEDTAVYYCYAYRWTTRYKYWGQGTLVTVSS

SEQ ID NO: 1573 - protein, 117 aa, synthetic construct
  REGION 1..117: note = Description of Artificial Sequence: Synthetic polypeptide
EVQLVESGGGLVQPGGSLTLSCAASGSSVKFLSMAWYRQAPGKKRELVAGISADGSTMYIDSVKGRFTISRDNAKNSVYLQMNSLRAEDTAVYYCYAYRWHTRYTYWGQGTLVTVSS

SEQ ID NO: 1574 - protein, 117 aa, synthetic construct
  REGION 1..117: note = Description of Artificial Sequence: Synthetic polypeptide
EVQLVESGGGLVQPGGSLTLSCAASGSGVRFLSMAWYRQAPGKKRELVAGISPDGSTDYIDSVKGRFTISRDNAKNSVYLQMNSLRAEDTAVYYCYAYRWTRRYTYWGQGTLVTVSS

SEQ ID NO: 1575 - protein, 117 aa, synthetic construct
  REGION 1..117: note = Description of Artificial Sequence: Synthetic polypeptide
EVQLVESGGGLVQPGGSLTLSCAASGSSVRFLSMAWYRQAPGKKRELVAGISGDGSTDYIDSVKGRFTISRDNAKNSVYLQMNSLRAEDTAVYYCYAYRWMTRYTYWGQGTLVTVSS

SEQ ID NO: 1576 - protein, 117 aa, synthetic construct
  REGION 1..117: note = Description of Artificial Sequence: Synthetic polypeptide
EVQLVESGGGLVQPGGSLTLSCAASGSSVHFLSMAWYRQAPGKKRELVAGISRDGSTDYIDSVKGRFTISRDNAKNSVYLQMNSLRAEDTAVYYCYAYRWTTRYRYWGQGTLVTVSS

SEQ ID NO: 1577 - protein, 117 aa, synthetic construct
  REGION 1..117: note = Description of Artificial Sequence: Synthetic polypeptide
EVQLVESGGGLVQPGGSLTLSCAASGSSVRFLSMAWYRQAPGKKRELVAGISRDGSTDYIDSVKGRFTISRDNAKNSVYLQMNSLRAEDTAVYYCYAYRWSTRYTYWGQGTLVTVSS

SEQ ID NO: 1578 - protein, 117 aa, synthetic construct
  REGION 1..117: note = Description of Artificial Sequence: Synthetic polypeptide
EVQLVESGGGLVQPGGSLTLSCAASGSKVSFLSMAWYRQAPGKKRELVAGISRDGSTDYIDSVKGRFTISRDNAKNSVYLQMNSLRAEDTAVYYCYAYRWTTRYTFWGQGTLVTVSS

SEQ ID NO: 1579 - protein, 117 aa, synthetic construct
  REGION 1..117: note = Description of Artificial Sequence: Synthetic polypeptide
EVQLVESGGGLVQPGGSLTLSCAASGSSVSFLSMAWYRQAPGKKRELVAGISADGSTDYIDSVKGRFTISRDNAKNSVYLQMNSLRAEDTAVYYCYAYRWRTRYTYWGQGTLVTVSS

SEQ ID NO: 1580 - protein, 117 aa, synthetic construct
  REGION 1..117: note = Description of Artificial Sequence: Synthetic polypeptide
EVQLVESGGGLVQPGGSLTLSCAASGSKVSFLSMAWYRQAPGKKRELVAGISTDGSTDYIDSVKGRFTISRDNAKNSVYLQMNSLRAEDTAVYYCYAYRWTTRRTYWGQGTLVTVSS

SEQ ID NO: 1581 - protein, 117 aa, synthetic construct
  REGION 1..117: note = Description of Artificial Sequence: Synthetic polypeptide
EVQLVESGGGLVQPGGSLTLSCAASGSRVSFLSMAWYRQAPGKKRELVAGISADGSTSYIDSVKGRFTISRDNAKNSVYLQMNSLRAEDTAVYYCYAYRWATRYTYWGQGTLVTVSS

SEQ ID NO: 1582 - protein, 117 aa, synthetic construct
  REGION 1..117: note = Description of Artificial Sequence: Synthetic polypeptide
EVQLVESGGGLVQPGGSLTLSCAASGSRVSFLSMAWYRQAPGKKRELVAGISADGSTLYIDSVKGRFTISRDNAKNSVYLQMNSLRAEDTAVYYCYAYRWHTRYTYWGQGTLVTVSS

SEQ ID NO: 1583 - protein, 117 aa, synthetic construct
  REGION 1..117: note = Description of Artificial Sequence: Synthetic polypeptide
EVQLVESGGGLVQPGGSLTLSCAASGSSVRFLSMAWYRQAPGKKRELVAGISRDGSTDYIDSVKGRFTISRDNAKNSVYLQMNSLRAEDTAVYYCYAYRWGTRYTYWGQGTLVTVSS

SEQ ID NO: 1584 - protein, 117 aa, synthetic construct
  REGION 1..117: note = Description of Artificial Sequence: Synthetic polypeptide
EVQLVESGGGLVQPGGSLTLSCAASYSSVSRLSMAWYRQAPGKKRELVAGISADGSTVYIDSVKGRFTISRDNAKNSVYLQMNSLRAEDTAVYYCYAYRWTTRNTYWGQGTLVTVSS

SEQ ID NO: 1585 - protein, 117 aa, synthetic construct
  REGION 1..117: note = Description of Artificial Sequence: Synthetic polypeptide
EVQLVESGGGLVQPGGSLTLSCAASGSSVSFLSMAWYRQAPGKKRELVAGISTDGSTDYIDSVKGRFTISRDNAKNSVYLQMNSLRAEDTAVYYCYAYRWRTRYTYWGQGTLVTVSS

SEQ ID NO: 1586 - protein, 117 aa, synthetic construct
  REGION 1..117: note = Description of Artificial Sequence: Synthetic polypeptide
EVQLVESGGGLVQPGGSLTLSCAASGSSVSFLSMAWYRQAPGKKRELVAGISADGSTLYIDSVKGRFTISRDNAKNSVYLQMNSLRAEDTAVYYCYAYRWTTRYAYWGQGTLVTVSS

SEQ ID NO: 1587 - protein, 117 aa, synthetic construct
  REGION 1..117: note = Description of Artificial Sequence: Synthetic polypeptide
EVQLVESGGGLVQPGGSLTLSCAASGSSVSFLSMAWYRQAPGKKRELVAGISADGRTDYIDSVKGRFTISRDNAKNSVYLQMNSLRAEDTAVYYCYAYRWRTRYTYWGQGTLVTVSS

SEQ ID NO: 1588 - protein, 117 aa, synthetic construct
  REGION 1..117: note = Description of Artificial Sequence: Synthetic polypeptide
EVQLVESGGGLVQPGGSLTLSCVASGTSVSFLSMAWYRQAPGKKRELVAGISADGSTIYIDSVKGRFTISRDNAKNSVYLQMNSLRAEDTAVYYCYAYRWTTRRTYWGQGTLVTVSS

SEQ ID NO: 1589 - protein, 117 aa, synthetic construct
  REGION 1..117: note = Description of Artificial Sequence: Synthetic polypeptide
EVQLVESGGGLVQPGGSLTLSCAASGSSVKFLSMAWYRQAPGKKRELVAGISADGSTLYIDSVKGRFTISRDNAKNSVYLQMNSLRAEDTAVYYCYAYRWTTRRTYWGQGTLVTVSS

SEQ ID NO: 1590 - protein, 117 aa, synthetic construct
  REGION 1..117: note = Description of Artificial Sequence: Synthetic polypeptide
EVQLVESGGGLVQPGGSLTLSCAASGSSVSFLSMAWYRQAPGKKRELVAGISRDGSTDYIDSVKGRFTISRDNAKNSVYLQMNSLRAEDTAVYYCYAYRWTSRYTYWGQGTLVTVSS

SEQ ID NO: 1591 - protein, 117 aa, synthetic construct
  REGION 1..117: note = Description of Artificial Sequence: Synthetic polypeptide
EVQLVESGGGLVQPGGSLTLSCAASGSRVSFLSMAWYRQAPGKKRELVAGISKDGSTDYIDSVKGRFTISRDNAKNSVYLQMNSLRAEDTAVYYCYAYRWTTRVTYWGQGTLVTVSS

SEQ ID NO: 1592 - protein, 117 aa, synthetic construct
  REGION 1..117: note = Description of Artificial Sequence: Synthetic polypeptide
EVQLVESGGGLVQPGGSLTLSCAASGSSVSVLSMAWYRQAPGKKRELVAGISADGSTDYIGSVKGRFTISRDNAKNSVYLQMNSLRAEDTAVYYCYAYRWTTRTTYWGQGTLVTVSS

SEQ ID NO: 1593 - protein, 117 aa, synthetic construct
  REGION 1..117: note = Description of Artificial Sequence: Synthetic polypeptide
EVQLVESGGGLVQPGGSLTLSCAASGSSVSFLSMAWYRQAPGKKRELVAGISVDGSTDYIDSVKGRFTISRDNAKNSVYLQMNSLRAEDTAVYYCYAYRWRTRYTYWGQGTLVTVSS

SEQ ID NO: 1594 - protein, 117 aa, synthetic construct
  REGION 1..117: note = Description of Artificial Sequence: Synthetic polypeptide
EVQLVESGGGLVQPGGSLTLSCAASGSRVSFLSMAWYRQAPGKKRELVAGISADGSTGYIDSVKGRFTISRDNAKNSVYLQMNSLRAEDTAVYYCYAYRWATRYTYWGQGTLVTVSS

SEQ ID NO: 1595 - protein, 117 aa, synthetic construct
  REGION 1..117: note = Description of Artificial Sequence: Synthetic polypeptide
EVQLVESGGGLVQPGGSLTLSCVASGSSVKFLSMAWYRQAPGKKRELVAGISGDGSTTYIDSVKGRFTISRDNAKNSVYLQMNSLRAEDTAVYYCYAYRWTTRRTYWGQGTLVTVSS

SEQ ID NO: 1596 - protein, 117 aa, synthetic construct
  REGION 1..117: note = Description of Artificial Sequence: Synthetic polypeptide
EVQLVESGGGLVQPGGSLTLSCAASGSSVRFLSMAWYRQAPGKKRELVAGISTDGSTDYIDSVKGRFTISRDNAKNSVYLQMNSLRAEDTAVYYCYALRWTTRYTYWGQGTLVTVSS

SEQ ID NO: 1597 - protein, 117 aa, synthetic construct
  REGION 1..117: note = Description of Artificial Sequence: Synthetic polypeptide
EVQLVESGGGLVQPGGSLTLSCAASGSSVSQLSMAWYRQAPGKKRELVAGISADGSTDYFDSVKGRFTISRDNAKNSVYLQMNSLRAEDTAVYYCYAYRWTTRGTYWGQGTLVTVSS

SEQ ID NO: 1598 - protein, 117 aa, synthetic construct
  REGION 1..117: note = Description of Artificial Sequence: Synthetic polypeptide
EVQLVESGGGLVQPGGSLTLSCAASGSRVSFLSMAWYRQAPGKKRELVAGISADGSTSYIDSVKGRFTISRDNAKNSVYLQMNSLRAEDTAVYYCYAYRWRTRYTYWGQGTLVTVSS

SEQ ID NO: 1599 - protein, 117 aa, synthetic construct
  REGION 1..117: note = Description of Artificial Sequence: Synthetic polypeptide
EVQLVESGGGLVQPGGSLTLSCAASKSSVSFLSMAWYRQAPGKKRELVAGISADGSTDYIDSVKGRFTISRDNAKNSVYLQMNSLRAEDTAVYYCYAYRWTTRATYWGQGTLVTVSS

SEQ ID NO: 1600 - protein, 117 aa, synthetic construct
  REGION 1..117: note = Description of Artificial Sequence: Synthetic polypeptide
EVQLVESGGGLVQPGGSLTLSCAASGSSVSFLSMAWYRQAPGKKRELVAGISADGSTAYIDSVKGRFTISRDNAKNSVYLQMNSLRAEDTAVYYCYAYRWTTRRTYWGQGTLVTVSS

SEQ ID NO: 1601 - protein, 117 aa, synthetic construct
  REGION 1..117: note = Description of Artificial Sequence: Synthetic polypeptide
EVQLVESGGGLVQPGGSLTLSCAASGSSVKFLSMAWYRQAPGKKRELVAGISADGSTVYIDSVKGRFTISRDNAKNSVYLQMNSLRAEDTAVYYCYAYRWPTRYTYWGQGTLVTVSS

SEQ ID NO: 1602 - protein, 117 aa, synthetic construct
  REGION 1..117: note = Description of Artificial Sequence: Synthetic polypeptide
EVQLVESGGGLVQPGGSLTLSCAASGSSVRFLSMAWYRQAPGKKRELVAGISQDGSTDYIDSVKGRFTISRDNAKNSVYLQMNSLRAEDTAVYYCYAYRWRTRYTYWGQGTLVTVSS

SEQ ID NO: 1603 - protein, 117 aa, synthetic construct
  REGION 1..117: note = Description of Artificial Sequence: Synthetic polypeptide
EVQLVESGGGLVQPGGSLTLSCAASGSSVRFLSMAWYRQAPGKKRELVAGISNDGSTDYIDSVKGRFTISRDNAKNSVYLQMNSLRAEDTAVYYCYAYRWKTRYTYWGQGTLVTVSS

SEQ ID NO: 1604 - protein, 117 aa, synthetic construct
  REGION 1..117: note = Description of Artificial Sequence: Synthetic polypeptide
EVQLVESGGGLVQPGGSLTLSCAASGSRVSFLSMAWYRQAPGKKRELVAGISARGSTDYIDSVKGRFTISRDNAKNSVYLQMNSLRAEDTAVYYCYAYRWSTRYTYWGQGTLVTVSS

SEQ ID NO: 1605 - protein, 117 aa, synthetic construct
  REGION 1..117: note = Description of Artificial Sequence: Synthetic polypeptide
EVQLVESGGGLVQPGGSLTLSCAASGSSVSFLSLAWYRQAPGKKRELVAGISADGSTDYIDSVKGRFTISRDNAKNSVYLQMNSLRAEDTAVYYCYAYRWKTRRTYWGQGTLVTVSS

SEQ ID NO: 1606 - protein, 117 aa, synthetic construct
  REGION 1..117: note = Description of Artificial Sequence: Synthetic polypeptide
EVQLVESGGGLVQPGGSLTLSCAASGSSVRFLSMAWYRQAPGKKRELVAGISRDGSTDYIDSVKGRFTISRDNAKNSVYLQMNSLRAEDTAVYYCYAYRWTTRRTYWGQGTLVTVSS

SEQ ID NO: 1607 - protein, 117 aa, synthetic construct
  REGION 1..117: note = Description of Artificial Sequence: Synthetic polypeptide
EVQLVESGGGLVQPGGSLTLSCAASGSKVSFLSMAWYRQAPGKKRELVAGISADGSTLYIDSVKGRFTISRDNAKNSVYLQMNSLRAEDTAVYYCYAYRWTTRYRYWGQGTLVTVSS

SEQ ID NO: 1608 - protein, 117 aa, synthetic construct
  REGION 1..117: note = Description of Artificial Sequence: Synthetic polypeptide
EVQLVESGGGLVQPGGSLTLSCAASGSSVSFLSMAWYRQAPGKKRELVAGISADGSTNYIDSVKGRFTISRDNAKNSVYLQMNSLRAEDTAVYYCYAYRWRTRYTYWGQGTLVTVSS

SEQ ID NO: 1609 - protein, 117 aa, synthetic construct
  REGION 1..117: note = Description of Artificial Sequence: Synthetic polypeptide
EVQLVESGGGLVQPGGSLTLSCAASGSSVRFLSMAWYRQAPGKKRELVAGISADGSTVYIDSVKGRFTISRDNAKNSVYLQMNSLRAEDTAVYYCYAYRWTTRYKYWGQGTLVTVSS

SEQ ID NO: 1610 - protein, 117 aa, synthetic construct
  REGION 1..117: note = Description of Artificial Sequence: Synthetic polypeptide
EVQLVESGGGLVQPGGSLTLSCAASGSKVSFLSMAWYRQAPGKKRELVAGISADGSTTYIDSVKGRFTISRDNAKNSVYLQMNSLRAEDTAVYYCYAYRWKTRYTYWGQGTLVTVSS

SEQ ID NO: 1611 - protein, 117 aa, synthetic construct
  REGION 1..117: note = Description of Artificial Sequence: Synthetic polypeptide
EVQLVESGGGLVQPGGSLTLSCAASGSSVKFLSMAWYRQAPGKKRELVAGISADGSTDYIGSVKGRFTISRDNAKNSVYLQMNSLRAEDTAVYYCYAYRWTTRVTYWGQGTLVTVSS

SEQ ID NO: 1612 - protein, 117 aa, synthetic construct
  REGION 1..117: note = Description of Artificial Sequence: Synthetic polypeptide
EVQLVESGGGLVQPGGSLTLSCAASGSSVKFLSMAWYRQAPGKKRELVAGISRDGSTDYIDSVKGRFTISRDNAKNSVYLQMNSLRAEDTAVYYCYAYRWTTRFTYWGQGTLVTVSS

SEQ ID NO: 1613 - protein, 117 aa, synthetic construct
  REGION 1..117: note = Description of Artificial Sequence: Synthetic polypeptide
EVQLVESGGGLVQPGGSLTLSCAASGSRVSFLSMAWYRQAPGKKRELVAGISADGSTTYIDSVKGRFTISRDNAKNSVYLQMNSLRAEDTAVYYCYAYRWTTRFTYWGQGTLVTVSS

SEQ ID NO: 1614 - protein, 117 aa, synthetic construct
  REGION 1..117: note = Description of Artificial Sequence: Synthetic polypeptide
EVQLVESGGGLVQPGGSLTLSCAASGSSVLFLSMAWYRQAPGKKRELVAGVSSDGSTDYIDSVKGRFTISRDNAKNSVYLQMNSLRAEDTAVYYCYAYRWRTRYTYWGQGTLVTVSS

SEQ ID NO: 1615 - protein, 117 aa, synthetic construct
  REGION 1..117: note = Description of Artificial Sequence: Synthetic polypeptide
EVQLVESGGGLVQPGGSLTLSCAASGSRVSFLSMAWYRQAPGKKRELVAGISADGHTDYIDSVKGRFTISRDNAKNSVYLQMNSLRAEDTAVYYCYAYRWTTRYTHWGQGTLVTVSS

SEQ ID NO: 1616 - protein, 117 aa, synthetic construct
  REGION 1..117: note = Description of Artificial Sequence: Synthetic polypeptide
EVQLVESGGGLVQPGGSLTLSCAASGSRVSFLSMAWYRQAPGKKRELVAGISADGSTDYFDSVKGRFTISRDNAKNSVYLQMNSLRAEDTAVYYCYAYRWTRRYTYWGQGTLVTVSS

SEQ ID NO: 1617 - protein, 117 aa, synthetic construct
  REGION 1..117: note = Description of Artificial Sequence: Synthetic polypeptide
EVQLVESGGGLVQPGGSLTLSCAASGSSVGFLSMAWYRQAPGKKRELVAGISADGSTVYIDSVKGRFTISRDNAKNSVYLQMNSLRAEDTAVYYCYAYRWTTRYTYWGQGTLVTVSS

SEQ ID NO: 1618 - protein, 117 aa, synthetic construct
  REGION 1..117: note = Description of Artificial Sequence: Synthetic polypeptide
EVQLVESGGGLVQPGGSLTLSCAASGSSVSFMSMAWYRQAPGKKRELVAGISADGSTDYIASVKGRFTISRDNAKNSVYLQMNSLRAEDTAVYYCYAYRWTTRSTYWGQGTLVTVSS

SEQ ID NO: 1619 - protein, 117 aa, synthetic construct
  REGION 1..117: note = Description of Artificial Sequence: Synthetic polypeptide
EVQLVESGGGLVQPGGSLTLSCAASGSSVSFLSMAWYRQAPGKKRELVAGISADGSTDYISSVKGRFTISRDNAKNSVYLQMNSLRAEDTAVYYCYAYSWTTRYTYWGQGTLVTVSS

SEQ ID NO: 1620 - protein, 117 aa, synthetic construct
  REGION 1..117: note = Description of Artificial Sequence: Synthetic polypeptide
EVQLVESGGGLVQPGGSLTLSCAASGSSVTFLSMAWYRQAPGKKRELVAGISADGSTVYIDSVKGRFTISRDNAKNSVYLQMNSLRAEDTAVYYCYAYRWTTRGTYWGQGTLVTVSS

SEQ ID NO: 1621 - protein, 117 aa, synthetic construct
  REGION 1..117: note = Description of Artificial Sequence: Synthetic polypeptide
EVQLVESGGGLVQPGGSLTLSCAASGSSVRFLSMAWYRQAPGKKRELVAGISADGSTVYIDSVKGRFTISRDNAKNSVYLQMNSLRAEDTAVYYCYAYRWKTRYTYWGQGTLVTVSS

SEQ ID NO: 1622 - protein, 117 aa, synthetic construct
  REGION 1..117: note = Description of Artificial Sequence: Synthetic polypeptide
EVQLVESGGGLVQPGGSLTLSCAASGSKVSFLSMAWYRQAPGKKRELVAGISADGSTTYIDSVKGRFTISRDNAKNSVYLQMNSLRAEDTAVYYCYAYRWTTRFTYWGQGTLVTVSS

SEQ ID NO: 1623 - protein, 117 aa, synthetic construct
  REGION 1..117: note = Description of Artificial Sequence: Synthetic polypeptide
EVQLVESGGGLVQPGGSLTLSCAASGSKVSFMSMAWYRQAPGKKRELVAGISVDGSTDYIDSVKGRFTISRDNAKNSVYLQMNSLRAEDTAVYYCYAYRWRTRYTYWGQGTLVTVSS

SEQ ID NO: 1624 - protein, 117 aa, synthetic construct
  REGION 1..117: note = Description of Artificial Sequence: Synthetic polypeptide
EVQLVESGGGLVQPGGSLTLSCAASGSSVSNLSMAWYRQAPGKKRELVAGISADGSTAYIDSVKGRFTISRDNAKNSVYLQMNSLRAEDTAVYYCYAYRWTTRRTYWGQGTLVTVSS

SEQ ID NO: 1625 - protein, 117 aa, synthetic construct
  REGION 1..117: note = Description of Artificial Sequence: Synthetic polypeptide
EVQLVESGGGLVQPGGSLTLSCAASNSSVSKLSMAWYRQAPGKKRELVAGISADGSTAYIDSVKGRFTISRDNAKNSVYLQMNSLRAEDTAVYYCYAYRWSTRYTYWGQGTLVTVSS

SEQ ID NO: 1626 - protein, 117 aa, synthetic construct
  REGION 1..117: note = Description of Artificial Sequence: Synthetic polypeptide
EVQLVESGGGLVQPGGSLTLSCAASGSKVSFLSMAWYRQAPGKKRELVAGISADGSKDYIDSVKGRFTISRDNAKNSVYLQMNSLRAEDTAVYYCYAYRWTTRLTYWGQGTLVTVSS

SEQ ID NO: 1627 - protein, 117 aa, synthetic construct
  REGION 1..117: note = Description of Artificial Sequence: Synthetic polypeptide
EVQLVESGGGLVQPGGSLTLSCVASGSQVSFLSMAWYRQAPGKKRELVAGISADGSTDYFDSVKGRFTISRDNAKNSVYLQMNSLRAEDTAVYYCYAYRWTRRYTYWGQGTLVTVSS

SEQ ID NO: 1628 - protein, 117 aa, synthetic construct
  REGION 1..117: note = Description of Artificial Sequence: Synthetic polypeptide
EVQLVESGGGLVQPGGSLTLSCAASGSKVSFMSMAWYRQAPGKKRELVAGISADGSTDYIDSVKGRFTISRDNAKNSVYLQMNSLRAEDTAVYYCYAYRWTTRLTYWGQGTLVTVSS

SEQ ID NO: 1629 - protein, 117 aa, synthetic construct
  REGION 1..117: note = Description of Artificial Sequence: Synthetic polypeptide
EVQLVESGGGLVQPGGSLTLSCAASGSRVSFLSMAWYRQAPGKKRELVAGISADGSTVYIDSVKGRFTISRDNAKNSVYLQMNSLRAEDTAVYYCYAYRWTRRYTYWGQGTLVTVSS

SEQ ID NO: 1630 - protein, 117 aa, synthetic construct
  REGION 1..117: note = Description of Artificial Sequence: Synthetic polypeptide
EVQLVESGGGLVQPGGSLTLSCAASGSSVRFLSMAWYRQAPGKKRELVAGISADGSTVYIDSVKGRFTISRDNAKNSVYLQMNSLRAEDTAVYYCYAYRWTTRRTYWGQGTLVTVSS

SEQ ID NO: 1631 - protein, 117 aa, synthetic construct
  REGION 1..117: note = Description of Artificial Sequence: Synthetic polypeptide
EVQLVESGGGLVQPGGSLTLSCAASGSKVSFLSMAWYRQAPGKKRELVAGISARGSTDYIDSVKGRFTISRDNAKNSVYLQMNSLRAEDTAVYYCYAYQWTTRYTYWGQGTLVTVSS

SEQ ID NO: 1632 - protein, 117 aa, synthetic construct
  REGION 1..117: note = Description of Artificial Sequence: Synthetic polypeptide
EVQLVESGGGLVQPGGSLTLSCAASGSSVRFLSMAWYRQAPGKKRELVAGISATGSTDYIDSVKGRFTISRDNAKNSVYLQMNSLRAEDTAVYYCYAYRWTRRYTYWGQGTLVTVSS

SEQ ID NO: 1633 - protein, 117 aa, synthetic construct
  REGION 1..117: note = Description of Artificial Sequence: Synthetic polypeptide
EVQLVESGGGLVQPGGSLTLSCAASGSSVSFLSIAWYRQAPGKKRELVAGISKDGSTDYIDSVKGRFTISRDNAKNSVYLQMNSLRAEDTAVYYCYAYRWTTRMTYWGQGTLVTVSS

SEQ ID NO: 1634 - protein, 117 aa, synthetic construct
  REGION 1..117: note = Description of Artificial Sequence: Synthetic polypeptide
EVQLVESGGGLVQPGGSLTLSCAASGSSSSFLSMAWYRQAPGKKRELVAGISADGSTVYIDSVKGRFTISRDNAKNSVYLQMNSLRAEDTAVYYCYAYRWTTRRTYWGQGTLVTVSS

SEQ ID NO: 1635 - protein, 117 aa, synthetic construct
  REGION 1..117: note = Description of Artificial Sequence: Synthetic polypeptide
EVQLVESGGGLVQPGGSLTLSCAASGSSVKFLSMAWYRQAPGKKRELVAGISPDGSTDYIDSVKGRFTISRDNAKNSVYLQMNSLRAEDTAVYYCYAYRWTTRYRYWGQGTLVTVSS

SEQ ID NO: 1636 - protein, 117 aa, synthetic construct
  REGION 1..117: note = Description of Artificial Sequence: Synthetic polypeptide
EVQLVESGGGLVQPGGSLTLSCAASGSSVNFLSMAWYRQAPGKKRELVAGISADGSTHYIDSVKGRFTISRDNAKNSVYLQMNSLRAEDTAVYYCYAYRWLTRYTYWGQGTLVTVSS

SEQ ID NO: 1637 - protein, 117 aa, synthetic construct
  REGION 1..117: note = Description of Artificial Sequence: Synthetic polypeptide
EVQLVESGGGLVQPGGSLTLSCAASGSSVKFLSMAWYRQAPGKKRELVAGISADGSTDYILSVKGRFTISRDNAKNSVYLQMNSLRAEDTAVYYCYAYEWTTRYTYWGQGTLVTVSS

SEQ ID NO: 1638 - protein, 117 aa, synthetic construct
  REGION 1..117: note = Description of Artificial Sequence: Synthetic polypeptide
EVQLVESGGGLVQPGGSLTLSCAASGSSVSFLSMAWYRQAPGKKRELVAGISADGSTDYIHSVKGRFTISRDNAKNSVYLQMNSLRAEDTAVYYCYAYRWRTRYTYWGQGTLVTVSS

SEQ ID NO: 1639 - protein, 117 aa, synthetic construct
  REGION 1..117: note = Description of Artificial Sequence: Synthetic polypeptide
EVQLVESGGGLVQPGGSLTLSCAASGSSVRFLSMAWYRQAPGKKRELVAGISVDGSTDYIDSVKGRFTISRDNAKNSVYLQMNSLRAEDTAVYYCYAYRWRTRYTYWGQGTLVTVSS

SEQ ID NO: 1640 - protein, 117 aa, synthetic construct
  REGION 1..117: note = Description of Artificial Sequence: Synthetic polypeptide
EVQLVESGGGLVQPGGSLTLSCAASGSSVSFLSVAWYRQAPGKKRELVAGISRDGSTDYIDSVKGRFTISRDNAKNSVYLQMNSLRAEDTAVYYCYAYRWRTRYTYWGQGTLVTVSS

SEQ ID NO: 1641 - protein, 117 aa, synthetic construct
  REGION 1..117: note = Description of Artificial Sequence: Synthetic polypeptide
EVQLVESGGGLVQPGGSLTLSCAASGSQVSFLSMAWYRQAPGKKRELVAGISADGSTVYIDSVKGRFTISRDNAKNSVYLQMNSLRAEDTAVYYCYAYRWSTRYTYWGQGTLVTVSS

SEQ ID NO: 1642 - protein, 117 aa, synthetic construct
  REGION 1..117: note = Description of Artificial Sequence: Synthetic polypeptide
EVQLVESGGGLVQPGGSLTLSCAASGTSVSFLSMAWYRQAPGKKRELVAGISADGSTDYIRSVKGRFTISRDNAKNSVYLQMNSLRAEDTAVYYCYAYRWTTRLTYWGQGTLVTVSS

SEQ ID NO: 1643 - protein, 117 aa, synthetic construct
  REGION 1..117: note = Description of Artificial Sequence: Synthetic polypeptide
EVQLVESGGGLVQPGGSLTLSCAASGSRVSFLSMAWYRQAPGKKRELVAGISADGSTMYIDSVKGRFTISRDNAKNSVYLQMNSLRAEDTAVYYCYAYRWTTRLTYWGQGTLVTVSS

SEQ ID NO: 1644 - protein, 117 aa, synthetic construct
  REGION 1..117: note = Description of Artificial Sequence: Synthetic polypeptide
EVQLVESGGGLVQPGGSLTLSCAASGSSVKFLSMAWYRQAPGKKRELVAGISTDGSTDYIDSVKGRFTISRDNAKNSVYLQMNSLRAEDTAVYYCYAYKWTTRYTYWGQGTLVTVSS

SEQ ID NO: 1645 - protein, 117 aa, synthetic construct
  REGION 1..117: note = Description of Artificial Sequence: Synthetic polypeptide
EVQLVESGGGLVQPGGSLTLSCAASGSSVSFLSSAWYRQAPGKKRELVAGISADGSTLYIDSVKGRFTISRDNAKNSVYLQMNSLRAEDTAVYYCYAYRWTTRSTYWGQGTLVTVSS

SEQ ID NO: 1646 - protein, 117 aa, synthetic construct
  REGION 1..117: note = Description of Artificial Sequence: Synthetic polypeptide
EVQLVESGGGLVQPGGSLTLSCAASGSSVKFLSMAWYRQAPGKKRELVAGISADGSTDYIDSVKGRFTISRDNAKNSVYLQMNSLRAEDTAVYYCYAYRWRTRYTYWGQGTLVTVSS

SEQ ID NO: 1647 - protein, 117 aa, synthetic construct
  REGION 1..117: note = Description of Artificial Sequence: Synthetic polypeptide
EVQLVESGGGLVQPGGSLTLSCAASGSSVSFLSMAWYRQAPGKKRELVAGISATGSTDYIDSVKGRFTISRDNAKNSVYLQMNSLRAEDTAVYYCYAYRWSTRYTYWGQGTLVTVSS

SEQ ID NO: 1648 - protein, 117 aa, synthetic construct
  REGION 1..117: note = Description of Artificial Sequence: Synthetic polypeptide
EVQLVESGGGLVQPGGSLTLSCAASGSTVSFLSMAWYRQAPGKKRELVAGISHDGSTDYIDSVKGRFTISRDNAKNSVYLQMNSLRAEDTAVYYCYAYRWTTRYTYWGQGTLVTVSS

SEQ ID NO: 1649 - protein, 117 aa, synthetic construct
  REGION 1..117: note = Description of Artificial Sequence: Synthetic polypeptide
EVQLVESGGGLVQPGGSLTLSCAASGSSVQFLSMAWYRQAPGKKRELVAGISYDGSTDYIDSVKGRFTISRDNAKNSVYLQMNSLRAEDTAVYYCYAYRWRTRYTYWGQGTLVTVSS

SEQ ID NO: 1650 - protein, 117 aa, synthetic construct
  REGION 1..117: note = Description of Artificial Sequence: Synthetic polypeptide
EVQLVESGGGLVQPGGSLTLSCAASRSSVSFLSMAWYRQAPGKKRELVAGISTDGSTDYIDSVKGRFTISRDNAKNSVYLQMNSLRAEDTAVYYCYAYRWLTRYTYWGQGTLVTVSS

SEQ ID NO: 1651 - protein, 117 aa, synthetic construct
  REGION 1..117: note = Description of Artificial Sequence: Synthetic polypeptide
EVQLVESGGGLVQPGGSLTLSCAASGSKVSFLSMAWYRQAPGKKRELVAGISADGSTAYIDSVKGRFTISRDNAKNSVYLQMNSLRAEDTAVYYCYAYRWRTRYTYWGQGTLVTVSS

SEQ ID NO: 1652 - protein, 117 aa, synthetic construct
  REGION 1..117: note = Description of Artificial Sequence: Synthetic polypeptide
EVQLVESGGGLVQPGGSLTLSCAASGSRVSFLSMAWYRQAPGKKRELVAGISADGSTDYIESVKGRFTISRDNAKNSVYLQMNSLRAEDTAVYYCYAYRWTTRYTYWGQGTLVTVSS

SEQ ID NO: 1653 - protein, 117 aa, synthetic construct
  REGION 1..117: note = Description of Artificial Sequence: Synthetic polypeptide
EVQLVESGGGLVQPGGSLTLSCAASGSSVSFLSMAWYRQAPGKKRELVAGISIDGSTDYIKSVKGRFTISRDNAKNSVYLQMNSLRAEDTAVYYCYAYRWTTRYRYWGQGTLVTVSS

SEQ ID NO: 1654 - protein, 117 aa, synthetic construct
  REGION 1..117: note = Description of Artificial Sequence: Synthetic polypeptide
EVQLVESGGGLVQPGGSLTLSCAASGSKVSFLSMAWYRQAPGKKRELVAGISADGSKDYIDSVKGRFTISRDNAKNSVYLQMNSLRAEDTAVYYCYAYRWTTRYTYWGQGTLVTVSS

SEQ ID NO: 1655 - protein, 117 aa, synthetic construct
  REGION 1..117: note = Description of Artificial Sequence: Synthetic polypeptide
EVQLVESGGGLVQPGGSLTLSCAASGSSVRFLSMAWYRQAPGKKRELVAGISADGSTVYIDSVKGRFTISRDNAKNSVYLQMNSLRAEDTAVYYCYAYRWPTRYTYWGQGTLVTVSS

SEQ ID NO: 1656 - protein, 117 aa, synthetic construct
  REGION 1..117: note = Description of Artificial Sequence: Synthetic polypeptide
EVQLVESGGGLVQPGGSLTLSCAASGSSVKFLSMAWYRQAPGKKRELVAGISRDGSTDYIDSVKGRFTISRDNAKNSVYLQMNSLRAEDTAVYYCYAYRWTTRHTYWGQGTLVTVSS

SEQ ID NO: 1657 - protein, 117 aa, synthetic construct
  REGION 1..117: note = Description of Artificial Sequence: Synthetic polypeptide
EVQLVESGGGLVQPGGSLTLSCAASGSSVKFLSMAWYRQAPGKKRELVAGISADGSTDYIHSVKGRFTISRDNAKNSVYLQMNSLRAEDTAVYYCYAYRWTRRYTYWGQGTLVTVSS

SEQ ID NO: 1658 - protein, 117 aa, synthetic construct
  REGION 1..117: note = Description of Artificial Sequence: Synthetic polypeptide
EVQLVESGGGLVQPGGSLTLSCAASGSSVSILSMAWYRQAPGKKRELVAGISADGSTIYIDSVKGRFTISRDNAKNSVYLQMNSLRAEDTAVYYCYAYRWHTRYTYWGQGTLVTVSS

SEQ ID NO: 1659 - protein, 117 aa, synthetic construct
  REGION 1..117: note = Description of Artificial Sequence: Synthetic polypeptide
EVQLVESGGGLVQPGGSLTLSCAASGSSVSFLSVAWYRQAPGKKRELVAGISANGSTDYIDSVKGRFTISRDNAKNSVYLQMNSLRAEDTAVYYCYAYRWTNRYTYWGQGTLVTVSS

SEQ ID NO: 1660 - protein, 117 aa, synthetic construct
  REGION 1..117: note = Description of Artificial Sequence: Synthetic polypeptide
EVQLVESGGGLVQPGGSLTLSCAASGSSVRFLSMAWYRQAPGKKRELVAGISTDGSTDYIDSVKGRFTISRDNAKNSVYLQMNSLRAEDTAVYYCYAYRWTTRYRYWGQGTLVTVSS

SEQ ID NO: 1661 - protein, 117 aa, synthetic construct
  REGION 1..117: note = Description of Artificial Sequence: Synthetic polypeptide
EVQLVESGGGLVQPGGSLTLSCAASGSRVSFLSMAWYRQAPGKKRELVAGISYDGSTDYIDSVKGRFTISRDNAKNSVYLQMNSLRAEDTAVYYCYAYRWTTRRTYWGQGTLVTVSS

SEQ ID NO: 1662 - protein, 117 aa, synthetic construct
  REGION 1..117: note = Description of Artificial Sequence: Synthetic polypeptide
EVQLVESGGGLVQPGGSLTLSCAASGHSVSFLSMAWYRQAPGKKRELVAGISADGSTDYIASVKGRFTISRDNAKNSVYLQMNSLRAEDTAVYYCYAYRWSTRYTYWGQGTLVTVSS

SEQ ID NO: 1663 - protein, 117 aa, synthetic construct
  REGION 1..117: note = Description of Artificial Sequence: Synthetic polypeptide
EVQLVESGGGLVQPGGSLTLSCAASGSSVRFLSMAWYRQAPGKKRELVAGISADGSTDYIGSVKGRFTISRDNAKNSVYLQMNSLRAEDTAVYYCYAYRWSTRYTYWGQGTLVTVSS

SEQ ID NO: 1664 - protein, 117 aa, synthetic construct
  REGION 1..117: note = Description of Artificial Sequence: Synthetic polypeptide
EVQLVESGGGLVQPGGSLTLSCAASGSSVSFLSMAWYRQAPGKKRELVAGISANGSTDYYDSVKGRFTISRDNAKNSVYLQMNSLRAEDTAVYYCYAYRWRTRYTYWGQGTLVTVSS

SEQ ID NO: 1665 - protein, 117 aa, synthetic construct
  REGION 1..117: note = Description of Artificial Sequence: Synthetic polypeptide
EVQLVESGGGLVQPGGSLTLSCAASGSRVSFLSMAWYRQAPGKKRELVAGISADGSTSYIDSVKGRFTISRDNAKNSVYLQMNSLRAEDTAVYYCYAYRWTTRYTYWGQGTLVTVSS

SEQ ID NO: 1666 - protein, 117 aa, synthetic construct
  REGION 1..117: note = Description of Artificial Sequence: Synthetic polypeptide
EVQLVESGGGLVQPGGSLTLSCAASGSSVKFLSMAWYRQAPGKKRELVAGVSADGSTDYIDSVKGRFTISRDNAKNSVYLQMNSLRAEDTAVYYCYAYEWTTRYTYWGQGTLVTVSS

SEQ ID NO: 1667 - protein, 117 aa, synthetic construct
  REGION 1..117: note = Description of Artificial Sequence: Synthetic polypeptide
EVQLVESGGGLVQPGGSLTLSCAASGSSVSRLSMAWYRQAPGKKRELVAGISARGSTDYIDSVKGRFTISRDNAKNSVYLQMNSLRAEDTAVYYCYAYRWTTRSTYWGQGTLVTVSS

SEQ ID NO: 1668 - protein, 117 aa, synthetic construct
  REGION 1..117: note = Description of Artificial Sequence: Synthetic polypeptide
EVQLVESGGGLVQPGGSLTLSCAASGRSVSFLSMAWYRQAPGKKRELVAGISADGSTIYIDSVKGRFTISRDNAKNSVYLQMNSLRAEDTAVYYCYAYRWTTRYTYWGQGTLVTVSS

SEQ ID NO: 1669 - protein, 117 aa, synthetic construct
  REGION 1..117: note = Description of Artificial Sequence: Synthetic polypeptide
EVQLVESGGGLVQPGGSLTLSCAASGRSVSFLSMAWYRQAPGKKRELVAGISANGSTDYIDSVKGRFTISRDNAKNSVYLQMNSLRAEDTAVYYCYAYRWSTRYTYWGQGTLVTVSS

SEQ ID NO: 1670 - protein, 117 aa, synthetic construct
  REGION 1..117: note = Description of Artificial Sequence: Synthetic polypeptide
EVQLVESGGGLVQPGGSLTLSCAASGSSVKFLSMAWYRQAPGKKRELVAGISADGSTDYVDSVKGRFTISRDNAKNSVYLQMNSLRAEDTAVYYCYAYRWSTRYTYWGQGTLVTVSS

SEQ ID NO: 1671 - protein, 117 aa, synthetic construct
  REGION 1..117: note = Description of Artificial Sequence: Synthetic polypeptide
EVQLVESGGGLVQPGGSLTLSCAASGSSVSKLSMAWYRQAPGKKRELVAGISADGSTDYRDSVKGRFTISRDNAKNSVYLQMNSLRAEDTAVYYCYAYRWTYRYTYWGQGTLVTVSS

SEQ ID NO: 1672 - protein, 117 aa, synthetic construct
  REGION 1..117: note = Description of Artificial Sequence: Synthetic polypeptide
EVQLVESGGGLVQPGGSLTLSCAASGSSVSRLSMAWYRQAPGKKRELVAGISVDGSTDYIDSVKGRFTISRDNAKNSVYLQMNSLRAEDTAVYYCYAYRWTTRLTYWGQGTLVTVSS

SEQ ID NO: 1673 - protein, 117 aa, synthetic construct
  REGION 1..117: note = Description of Artificial Sequence: Synthetic polypeptide
EVQLVESGGGLVQPGGSLTLSCAASGSSVKFLSLAWYRQAPGKKRELVAGISADGSTDYILSVKGRFTISRDNAKNSVYLQMNSLRAEDTAVYYCYAYEWTTRYTYWGQGTLVTVSS

SEQ ID NO: 1674 - protein, 117 aa, synthetic construct
  REGION 1..117: note = Description of Artificial Sequence: Synthetic polypeptide
EVQLVESGGGLVQPGGSLTLSCAASGSSVSRLSLAWYRQAPGKKRELVAGISVDGSTDYIDSVKGRFTISRDNAKNSVYLQMNSLRAEDTAVYYCYAYRWTTRLTYWGQGTLVTVSS

SEQ ID NO: 1675 - protein, 119 aa, synthetic construct
  REGION 1..119: note = Description of Artificial Sequence: Synthetic polypeptide
EVQLVESGGGLVQPGGSLTLSCVASGTSSSINAMGWYRRAPGKQRELVAGISSDGSKVFNESVKGRFTISRDNAKNSVYLQMNSLRAEDTAVYYCYYFRPAAGSPMRYWGQGTLVTVSS

SEQ ID NO: 1676 - protein, 119 aa, synthetic construct
  REGION 1..119: note = Description of Artificial Sequence: Synthetic polypeptide
EVQLVESGGGLVQPGGSLTLSCVASGTTSSINAIGWYRRAPGKQRELVAGISSDGSEVYTDSVKGRFTISRDNAKNSVYLQMNSLRAEDTAVYYCYYFRTVDGSPLRYWGQGTLVTVSS

SEQ ID NO: 1677 - protein, 119 aa, synthetic construct
  REGION 1..119: note = Description of Artificial Sequence: Synthetic polypeptide
EVQLVESGGGLVQPGGSLTLSCVASGSTSSINAMAWYRRAPGKQRELVAGISSDDSNVYYESVKGRFTISRDNAKNSVYLQMNSLRAEDTAVYYCYYFRTVSGSSKRYWGQGTLVTVSS

SEQ ID NO: 1678 - protein, 119 aa, synthetic construct
  REGION 1..119: note = Description of Artificial Sequence: Synthetic polypeptide
EVQLVESGGGLVQPGGSLTLSCVASGQTYRVNAFGWYRRAPGKQRELVAGISSDGSKVYADSVKGRFTISRDNAKNSVYLQMNSLRAEDTAVYYCYYFSAGSGTEMSYWGQGTLVTVSS

SEQ ID NO: 1679 - protein, 119 aa, synthetic construct
  REGION 1..119: note = Description of Artificial Sequence: Synthetic polypeptide
EVQLVESGGGLVQPGGSLTLSCVASGSTSSINAMAWYRRAPGKQRELVAGISSDESTLYVDSVKGRFTISRDNAKNSVYLQMNSLRAEDTAVYYCYYFGSLSGSSTTYWGQGTLVTVSS

SEQ ID NO: 1680 - protein, 119 aa, synthetic construct
  REGION 1..119: note = Description of Artificial Sequence: Synthetic polypeptide
EVQLVESGGGLVQPGGSLTLSCVASGSASLTNATGWYRRAPGKQRELVAGISSDDSKVYSDSVKGRFTISRDNAKNSVYLQMNSLRAEDTAVYYCYYFGSVSGSWTRYWGQGTLVTVSS

SEQ ID NO: 1681 - protein, 119 aa, synthetic construct
  REGION 1..119: note = Description of Artificial Sequence: Synthetic polypeptide
EVQLVESGGGLVQPGGSLTLSCVASGYPSLNNAMGWYRRAPGKQRELVAGISSDGSQVYGASVKGRFTISRDNAKNSVYLQMNSLRAEDTAVYYCYYFRLVSGSSMSYWGQGTLVTVSS

SEQ ID NO: 1682 - protein, 119 aa, synthetic construct
  REGION 1..119: note = Description of Artificial Sequence: Synthetic polypeptide
EVQLVESGGGLVQPGGSLTLSCVASGSSSTINAIGWYRRAPGKQRELVAGISSDGSKVYADSVKGRFTISRDNAKNSVYLQMNSLRAEDTAVYYCYYFRTGSGTSKSYWGQGTLVTVSS

SEQ ID NO: 1683 - protein, 119 aa, synthetic construct
  REGION 1..119: note = Description of Artificial Sequence: Synthetic polypeptide
EVQLVESGGGLVQPGGSLTLSCVASGSTSYINAMGWYRRAPGKQRELVAGISSDGSNMYADSVKGRFTISRDNAKNSVYLQMNSLRAEDTAVYYCYYFSNMSGTTRRYWGQGTLVTVSS

SEQ ID NO: 1684 - protein, 119 aa, synthetic construct
  REGION 1..119: note = Description of Artificial Sequence: Synthetic polypeptide
EVQLVESGGGLVQPGGSLTLSCVASGSTSSVNALGWYRRAPGKQRELVAGISSDGSKVYTDSVKGRFTISRDNAKNSVYLQMNSLRAEDTAVYYCYYFRTVPGSAMGYWGQGTLVTVSS

SEQ ID NO: 1685 - protein, 119 aa, synthetic construct
  REGION 1..119: note = Description of Artificial Sequence: Synthetic polypeptide
EVQLVESGGGLVQPGGSLTLSCVASGSTSLSNAVGWYRRAPGKQRELVAGISSDGSKVSAESVKGRFTISRDNAKNSVYLQMNSLRAEDTAVYYCYYFRAESGSSMGYWGQGTLVTVSS

SEQ ID NO: 1686 - protein, 119 aa, synthetic construct
  REGION 1..119: note = Description of Artificial Sequence: Synthetic polypeptide
EVQLVESGGGLVQPGGSLTLSCVASGSTSSTNAIGWYRRAPGKQRELVAGISSDGSKVYDDSVKGRFTISRDNAKNSVYLQMNSLRAEDTAVYYCYYFRTLYGSSRSYWGQGTLVTVSS

SEQ ID NO: 1687 - protein, 119 aa, synthetic construct
  REGION 1..119: note = Description of Artificial Sequence: Synthetic polypeptide
EVQLVESGGGLVQPGGSLTLSCVASGLTSTINAMGWYRRAPGKQRELVAGISSDGSKVYDDSVKGRFTISRDNAKNSVYLQMNSLRAEDTAVYYCYYFSPFSGSDTGYWGQGTLVTVSS

SEQ ID NO: 1688 - protein, 119 aa, synthetic construct
  REGION 1..119: note = Description of Artificial Sequence: Synthetic polypeptide
EVQLVESGGGLVQPGGSLTLSCVASGVSPSKNAIGWYRRAPGKQRELVAGISSDGSAVYVGSVKGRFTISRDNAKNSVYLQMNSLRAEDTAVYYCYYFSTFSGSSISYWGQGTLVTVSS

SEQ ID NO: 1689 - protein, 119 aa, synthetic construct
  REGION 1..119: note = Description of Artificial Sequence: Synthetic polypeptide
EVQLVESGGGLVQPGGSLTLSCVASGSTSSINAVGWYRRAPGKQRELVAGISSDGSYVYSESVKGRFTISRDNAKNSVYLQMNSLRAEDTAVYYCYYFRTLAGSEMRYWGQGTLVTVSS

SEQ ID NO: 1690 - protein, 119 aa, synthetic construct
  REGION 1..119: note = Description of Artificial Sequence: Synthetic polypeptide
EVQLVESGGGLVQPGGSLTLSCVASGSTTMNNAMAWYRRAPGKQRELVAGISSDSSHVYADSVKGRFTISRDNAKNSVYLQMNSLRAEDTAVYYCYYFRTVSGSGVRYWGQGTLVTVSS

SEQ ID NO: 1691 - protein, 119 aa, synthetic construct
  REGION 1..119: note = Description of Artificial Sequence: Synthetic polypeptide
EVQLVESGGGLVQPGGSLTLSCVASGSTSKINAIGWYRRAPGKQRELVAGISSDSSIVYTDSVKGRFTISRDNAKNSVYLQMNSLRAEDTAVYYCYYFRPGAGHSNSYWGQGTLVTVSS

SEQ ID NO: 1692 - protein, 119 aa, synthetic construct
  REGION 1..119: note = Description of Artificial Sequence: Synthetic polypeptide
EVQLVESGGGLVQPGGSLTLSCVASGQTTALNAMGWYRRAPGKQRELVAGISSDGSEVNTDSVKGRFTISRDNAKNSVYLQMNSLRAEDTAVYYCYYFRRASGTAMSYWGQGTLVTVSS

SEQ ID NO: 1693 - protein, 119 aa, synthetic construct
  REGION 1..119: note = Description of Artificial Sequence: Synthetic polypeptide
EVQLVESGGGLVQPGGSLTLSCVASGATSSINAIGWYRRAPGKQRELVAGISSDGSKLSSDSVKGRFTISRDNAKNSVYLQMNSLRAEDTAVYYCYYFTSASGTDLSYWGQGTLVTVSS

SEQ ID NO: 1694 - protein, 119 aa, synthetic construct
  REGION 1..119: note = Description of Artificial Sequence: Synthetic polypeptide
EVQLVESGGGLVQPGGSLTLSCVASGSTSTINAMGWYRRAPGKQRELVAGISSDNSKVYADSVKGRFTISRDNAKNSVYLQMNSLRAEDTAVYYCYYFRSANGSSKRYWGQGTLVTVSS

SEQ ID NO: 1695 - protein, 119 aa, synthetic construct
  REGION 1..119: note = Description of Artificial Sequence: Synthetic polypeptide
EVQLVESGGGLVQPGGSLTLSCVASGSTSSINAMGWYRRAPGKQRELVAGISSDGSRVYFDSVKGRFTISRDNAKNSVYLQMNSLRAEDTAVYYCYYFKTIAGAGMRYWGQGTLVTVSS

SEQ ID NO: 1696 - protein, 119 aa, synthetic construct
  REGION 1..119: note = Description of Artificial Sequence: Synthetic polypeptide
EVQLVESGGGLVQPGGSLTLSCVASGSTSLVNAMGWYRRAPGKQRELVAGISSDGSLVYAESVKGRFTISRDNAKNSVYLQMNSLRAEDTAVYYCYYFRYGSGSSLSYWGQGTLVTVSS

SEQ ID NO: 1697 - protein, 119 aa, synthetic construct
  REGION 1..119: note = Description of Artificial Sequence: Synthetic polypeptide
EVQLVESGGGLVQPGGSLTLSCVASGSTSLNNAIGWYRRAPGKQRELVAGISSDGSVVYVDSVKGRFTISRDNAKNSVYLQMNSLRAEDTAVYYCYYFRTVPGASMKYWGQGTLVTVSS

SEQ ID NO: 1698 - protein, 119 aa, synthetic construct
  REGION 1..119: note = Description of Artificial Sequence: Synthetic polypeptide
EVQLVESGGGLVQPGGSLTLSCVASGSTSPVNAMAWYRRAPGKQRELVAGISSDGSKVYVDSVKGRFTISRDNAKNSVYLQMNSLRAEDTAVYYCYYFRTVDGSAISYWGQGTLVTVSS

SEQ ID NO: 1699 - protein, 119 aa, synthetic construct
  REGION 1..119: note = Description of Artificial Sequence: Synthetic polypeptide
EVQLVESGGGLVQPGGSLTLSCVASGTTSSMNAIGWYRRAPGKQRELVAGISSDGSKLYDESVKGRFTISRDNAKNSVYLQMNSLRAEDTAVYYCYYFRTVKGSGGSYWGQGTLVTVSS

SEQ ID NO: 1700 - protein, 119 aa, synthetic construct
  REGION 1..119: note = Description of Artificial Sequence: Synthetic polypeptide
EVQLVESGGGLVQPGGSLTLSCVASGETSSINAMAWYRRAPGKQRELVAGISSDYSKLYADSVKGRFTISRDNAKNSVYLQMNSLRAEDTAVYYCYYFRTVSGSSRGYWGQGTLVTVSS

SEQ ID NO: 1701 - protein, 119 aa, synthetic construct
  REGION 1..119: note = Description of Artificial Sequence: Synthetic polypeptide
EVQLVESGGGLVQPGGSLTLSCVASGSTSTINAIGWYRRAPGKQRELVAGISSDSSKVYTESVKGRFTISRDNAKNSVYLQMNSLRAEDTAVYYCYYFRPGPGSQMAYWGQGTLVTVSS

SEQ ID NO: 1702 - protein, 119 aa, synthetic construct
  REGION 1..119: note = Description of Artificial Sequence: Synthetic polypeptide
EVQLVESGGGLVQPGGSLTLSCVASGSTYSMNAMGWYRRAPGKQRELVAGISSDGSQVYVDSVKGRFTISRDNAKNSVYLQMNSLRAEDTAVYYCYYFRTVAGSASGYWGQGTLVTVSS

SEQ ID NO: 1703 - protein, 119 aa, synthetic construct; identical to SEQ ID NO: 1534
  REGION 1..119: note = Description of Artificial Sequence: Synthetic polypeptide

SEQ ID NO: 1704 - protein, 119 aa, synthetic construct
  REGION 1..119: note = Description of Artificial Sequence: Synthetic polypeptide
EVQLVESGGGLVQPGGSLTLSCVASGSTSTINAIGWYRRAPGKQRELVAGISSDGSKVYVDSVKGRFTISRDNAKNSVYLQMNSLRAEDTAVYYCYYFINLKGSSMAYWGQGTLVTVSS

SEQ ID NO: 1705 - protein, 119 aa, synthetic construct
  REGION 1..119: note = Description of Artificial Sequence: Synthetic polypeptide
EVQLVESGGGLVQPGGSLTLSCVASGSTSSINAIGWYRRAPGKQRELVAGISSDGSKVYADSVKGRFTISRDNAKNSVYLQMNSLRAEDTAVYYCYYFRMVTGSYGGYWGQGTLVTVSS

SEQ ID NO: 1706 - protein, 119 aa, synthetic construct
  REGION 1..119: note = Description of Artificial Sequence: Synthetic polypeptide
EVQLVESGGGLVQPGGSLTLSCVASGSISSINAMGWYRRAPGKQRELVAGISSDGSSVYADSVKGRFTISRDNAKNSVYLQMNSLRAEDTAVYYCYYFKSSYGLPMRYWGQGTLVTVSS

SEQ ID NO: 1707 - protein, 119 aa, synthetic construct
  REGION 1..119: note = Description of Artificial Sequence: Synthetic polypeptide
EVQLVESGGGLVQPGGSLTLSCVASGSTQVNNAMAWYRRAPGKQRELVAGISSDGSQVYYGSVKGRFTISRDNAKNSVYLQMNSLRAEDTAVYYCYYFKTVSGQSLRYWGQGTLVTVSS

SEQ ID NO: 1708 - protein, 119 aa, synthetic construct
  REGION 1..119: note = Description of Artificial Sequence: Synthetic polypeptide
EVQLVESGGGLVQPGGSLTLSCVASGSTASFNAMAWYRRAPGKQRELVAGISSDGSKVYTDSVKGRFTISRDNAKNSVYLQMNSLRAEDTAVYYCYYFRTVTGRAARYWGQGTLVTVSS

SEQ ID NO: 1709 - protein, 119 aa, synthetic construct
  REGION 1..119: note = Description of Artificial Sequence: Synthetic polypeptide
EVQLVESGGGLVQPGGSLTLSCVASGSPLSINAIGWYRRAPGKQRELVAGISSDGSKVSADSVKGRFTISRDNAKNSVYLQMNSLRAEDTAVYYCYYFGPAIGASRTYWGQGTLVTVSS

SEQ ID NO: 1710 - protein, 119 aa, synthetic construct
  REGION 1..119: note = Description of Artificial Sequence: Synthetic polypeptide
EVQLVESGGGLVQPGGSLTLSCVASGSTTFINAIGWYRRAPGKQRELVAGISSDGSKVYEDSVKGRFTISRDNAKNSVYLQMNSLRAEDTAVYYCYYFRTVSGAPKSYWGQGTLVTVSS

SEQ ID NO: 1711 - protein, 119 aa, synthetic construct
  REGION 1..119: note = Description of Artificial Sequence: Synthetic polypeptide
EVQLVESGGGLVQPGGSLTLSCVASGSTSSINAIGWYRRAPGKQRELVAGISSDRSKVYADSVKGRFTISRDNAKNSVYLQMNSLRAEDTAVYYCYYFHTVSGSSMSYWGQGTLVTVSS

SEQ ID NO: 1712 - protein, 119 aa, synthetic construct
  REGION 1..119: note = Description of Artificial Sequence: Synthetic polypeptide
EVQLVESGGGLVQPGGSLTLSCVASGETDTINAVGWYRRAPGKQRELVAGISSDGSKVYAESVKGRFTISRDNAKNSVYLQMNSLRAEDTAVYYCYYFRRLEGYSNRYWGQGTLVTVSS

SEQ ID NO: 1713 - protein, 119 aa, synthetic construct
  REGION 1..119: note = Description of Artificial Sequence: Synthetic polypeptide
EVQLVESGGGLVQPGGSLTLSCVASGSTSPINAIGWYRRAPGKQRELVAGISSDGSVVTTESVKGRFTISRDNAKNSVYLQMNSLRAEDTAVYYCYYFRTGSGSSMGYWGQGTLVTVSS

SEQ ID NO: 1714 - protein, 119 aa, synthetic construct
  REGION 1..119: note = Description of Artificial Sequence: Synthetic polypeptide
EVQLVESGGGLVQPGGSLTLSCVASGSITSSNAMGWYRRAPGKQRELVAGISSDGSHVHQESVKGRFTISRDNAKNSVYLQMNSLRAEDTAVYYCYYFTTVTGSSMSYWGQGTLVTVSS

SEQ ID NO: 1715 - protein, 117 aa, synthetic construct
  REGION 1..117: note = Description of Artificial Sequence: Synthetic polypeptide
EVQLVESGGGLVQPGGSLTLSCAASRYSVSNLSMAWYRQAPGKKRELVAGISADGSTVYVESVKGRFTISRDNAKNSVYLQMNSLRAEDTAVYYCYAYYWTERRPYWGQGTLVTVSS

SEQ ID NO: 1716 - protein, 117 aa, synthetic construct
  REGION 1..117: note = Description of Artificial Sequence: Synthetic polypeptide
EVQLVESGGGLVQPGDSLTLSCAASMSTVSVLSMAWYRQAPGKKRELVAGISSDGSTVYIDSVKGRFTISRDNAKNSVYLQMNSLRAEDTAIYYCYAYSWDDAHPYWGQGTLVTVSS

SEQ ID NO: 1717 - protein, 117 aa, synthetic construct
  REGION 1..117: note = Description of Artificial Sequence: Synthetic polypeptide
EVQLVESGGGLVQPGGSLTLSCAASDSYVSLLSMAWYRQAPGKKRELVAGISVDGSTHYVASVKGRFTISRDNAKNSVYLQMNSLRAEDTAVYYCYAYRWMTRLTYWGQGTLVTVSS

SEQ ID NO: 1718 - protein, 117 aa, synthetic construct
  REGION 1..117: note = Description of Artificial Sequence: Synthetic polypeptide
EVQLVESGGGLVQPGGSLTLSCAASDSAVSVLSIAWYRQAPGKKRELVAGISTDGSKHYIDSVKGRFTISRDNAKNSVYLQMNSLRAEDTAVYYCYAYDWADAQPYWGQGTLVTVSS

SEQ ID NO: 1719 - protein, 117 aa, synthetic construct
  REGION 1..117: note = Description of Artificial Sequence: Synthetic polypeptide
EVQLVESGGGLVQPGGSLTLSCAASHSSVTSLSLAWYRQAPGKKRELVAGISYDGSKYYAESVKGRFTISRDNAKNSVYLQMNSLRAEDTAVYYCYAYSWTDRLPYWGQGTLVTVSS

SEQ ID NO: 1720 - protein, 117 aa, synthetic construct
  REGION 1..117: note = Description of Artificial Sequence: Synthetic polypeptide
EVQLVESGGGLVQPGGSLTLSCAASDSVVKFLSMAWYRQAPGKKRELVAGISANGSRTYMESVKGRFTISRDNAKNSVYLQMNSLRAEDTAVYYCYAYRWATRLPYWGQGTLVTVSS

SEQ ID NO: 1721 - protein, 117 aa, synthetic construct
  REGION 1..117: note = Description of Artificial Sequence: Synthetic polypeptide
EVQLVESGGGLVQPGGSLTLSCAASDPSVWNLSMAWYRQAPGKKRELVAGISPDGSTDYVDSVKGRFTISRDNAKNSVYLQMNSLRAEDTAVYYCYAYKWSNRLPYWGQGTLVTVSS

SEQ ID NO: 1722 - protein, 117 aa, synthetic construct
  REGION 1..117: note = Description of Artificial Sequence: Synthetic polypeptide
EVQLVESGGGLVQPGGSLTLSCAASGTSVMLLSLAWYRQAPGKKRELVAGISPNGSAVYTESVKGRFTISRDNAKNSVYLQMNSLRAEDTAVYYCYAYGWKTRQPYWGQGTLVTVSS

SEQ ID NO: 1723 - protein, 117 aa, synthetic construct
  REGION 1..117: note = Description of Artificial Sequence: Synthetic polypeptide
EVQLVESGGGLVQPGGSLTLSCAASSSPVSNLSLAWYRQAPGKKRELVAGISPDGSTAYMESVKGRFTISRDNAKNSVYLQMNSLRAEDTAVYYCYAYRWPNRRGYWGQGTLVTVSS

SEQ ID NO: 1724 - protein, 117 aa, synthetic construct
  REGION 1..117: note = Description of Artificial Sequence: Synthetic polypeptide
EVQLVESGGGLVQPGGSLTLSCAASWRSVLLLSVAWYRQAPGKKRELVAGISNDGSTDYIDSVKGRFTISRDNAKNSVYLQMNSLRAEDTAVYYCYAYDWTTRQRYWGQGTLVTVSS

SEQ ID NO: 1725 - protein, 117 aa, synthetic construct
  REGION 1..117: note = Description of Artificial Sequence: Synthetic polypeptide
EVQLVESGGGLVQPGGSLTLSCAASSSSVQYLSMAWYRQAPGKKRELVAGISTDGSAVYFDSVKGRFTISRDNAKNSVYLQMNSLRAEDTAVYYCYAYNWSYAQPYWGQGTLVTVSS

SEQ ID NO: 1726 - protein, 117 aa, synthetic construct
  REGION 1..117: note = Description of Artificial Sequence: Synthetic polypeptide
EVQLVESGGGLVQPGGSLTLSCAASGTSVSLLSLAWYRQAPGKKRELVAGISTGGSTHYIESVKGRFTISRDNAKNSVYLQMNSLRAEDTAVYYCYAYNWTDSLQYWGQGTLVTVSS

SEQ ID NO: 1727 - protein, 117 aa, synthetic construct
  REGION 1..117: note = Description of Artificial Sequence: Synthetic polypeptide
EVQLVESGGGLVQPGGSLTLSCAASLSSVSNLSIAWYRQAPGKKRELVAGISTDGSTVYIDSVKGRFTISRDNAKNSVYLQMNSLRAEDTAVYYCYAYSWTTSLPYWGQGTLVTVSS

SEQ ID NO: 1728 - protein, 117 aa, synthetic construct
  REGION 1..117: note = Description of Artificial Sequence: Synthetic polypeptide
EVQLVESGGGLVQPGGSLTLSCAASMYSVSFLSMAWYRQAPGKKRELVAGISNEGSTYYMDSVKGRFTISRDNAKNSVYLQMNSLRAEDTAVYYCYAYKWRSRSTYWGQGTLVTVSS

SEQ ID NO: 1729 - protein, 117 aa, synthetic construct
  REGION 1..117: note = Description of Artificial Sequence: Synthetic polypeptide
EVQLVESGGGLVQPGGSLTLSCAASKSSVSHLSLAWYRQAPGKKRELVAGISADGSHVYTNSVKGRFTISRDNAKNSVYLQMNSLRAEDTAVYYCYAYSQTTRDPYWGQGTLVTVSS

SEQ ID NO: 1730 - protein, 117 aa, synthetic construct
  REGION 1..117: note = Description of Artificial Sequence: Synthetic polypeptide
EVQLVESGGGLVQPGGSLTLSCAASYTSVLDLSIAWYRQAPGKKRELVAGISDDGSRYYTDSVKGRFTISRDNAKNSVYLQMNSLRAEDTAVYYCYAYRWTARDTYWGQGTLVTVSS

SEQ ID NO: 1731 - protein, 117 aa, synthetic construct
  REGION 1..117: note = Description of Artificial Sequence: Synthetic polypeptide
EVQLVESGGGLVQPGGSLTLSCAASMSDVSFLSMAWYRQAPGKKRELVAGISAEGSTLYMESVKGRFTISRDNAKNSVYLQMNSLRAEDTAVYYCYAYRWTSRLSYWGQGTLVTVSS

SEQ ID NO: 1732 - protein, 117 aa, synthetic construct
  REGION 1..117: note = Description of Artificial Sequence: Synthetic polypeptide
EVQLVESGGGLVQPGGSLTLSCAASESSVSFLSSAWYRQAPGKKRELVAGISTDGSTVYIDSVKGRFTISRDNAKNSVYLQMNSLRAEDTAVYYCYAYSWTTRSRYWGQGTLVTVSS

SEQ ID NO: 1733 - protein, 117 aa, synthetic construct
  REGION 1..117: note = Description of Artificial Sequence: Synthetic polypeptide
EVQLVESGGGLVQPGGSLTLSCAASGDSVSLLSMAWYRQAPGKKRELVAGISANGSTSYIDSVKGRFTISRDNAKNSVYLQMNSLRAEDTAVYYCYAYNWTSRYRYWGQGTLVTVSS

SEQ ID NO: 1734 - protein, 117 aa, synthetic construct
  REGION 1..117: note = Description of Artificial Sequence: Synthetic polypeptide
EVQLVESGGGLVQPGGSLTLSCAASGSDVWYLSLAWYRQAPGKKRELVAGISDDGSRHYIESVKGRFTISRDNAKNSVYLQMNSLRAEDTAVYYCYAYSWKTRFPYWGQGTLVTVSS

SEQ ID NO: 1735 - protein, 117 aa, synthetic construct
  REGION 1..117: note = Description of Artificial Sequence: Synthetic polypeptide
EVQLVESGGGLVQPGGSLTLSCAASKSAVAFLSIAWYRQAPGKKRELVAGISPDGSTVYIESVKGRFTISRDNAKNSVYLQMNSLRAEDTAVYYCYAYSWTTRYPYWGQGTLVTVSS

SEQ ID NO: 1736 - protein, 117 aa, synthetic construct
  REGION 1..117: note = Description of Artificial Sequence: Synthetic polypeptide
EVQLVESGGGLVQPGGSLTLSCAASFSAVAYLSMAWYRQAPGKKRELVAGISDDGSTVYVDSVKGRFTISRDNAKNSVYLQMNSLRAEDTAVYYCYAYEWTNALPYWGQGTLVTVSS

SEQ ID NO: 1737 - protein, 117 aa, synthetic construct
  REGION 1..117: note = Description of Artificial Sequence: Synthetic polypeptide
EVQLVESGGGLVQPGGSLTLSCAASVYSVYDLSTAWYRQAPGKKRELVAGISDDGSTVYFDSVKGRFTISRDNAKNSVYLQMNSLRAEDTAVYYCYAYSWITRSPYWGQGTLVTVSS

SEQ ID NO: 1738 - protein, 117 aa, synthetic construct
  REGION 1..117: note = Description of Artificial Sequence: Synthetic polypeptide
EVQLVESGGGLVQPGGSLTLSCAASGDSVSFLSMAWYRQAPGKKRELVAGISDEGSTVYIGSVKGRFTISRDNAKNSVYLQMNSLRAEDTAVYYCYAYSWTTRRQYWGQGTLVTVSS

SEQ ID NO: 1739 - protein, 117 aa, synthetic construct
  REGION 1..117: note = Description of Artificial Sequence: Synthetic polypeptide
EVQLVESGGGLVQPGGSLTLSCAASSSSVSLLSLAWYRQAPGKKRELVAGISDDGSIVYMDSVKGRFTISRDNAKNSVYLQMNSLRAEDTAVYYCYAYSWITRSPYWGQGTLVTVSS

SEQ ID NO: 1740 - protein, 117 aa, synthetic construct
  REGION 1..117: note = Description of Artificial Sequence: Synthetic polypeptide
EVQLVESGGGLVQPGGSLTLSCAASADSVSFLSIAWYRQAPGKKRELVAGISDDGSKHYFDSVKGRFTISRDNAKNSVYLQMNSLRAEDTAVYYCYAYRWEESRQYWGQGTLVTVSS

SEQ ID NO: 1741 - protein, 117 aa, synthetic construct
  REGION 1..117: note = Description of Artificial Sequence: Synthetic polypeptide
EVQLVESGGGLVQPGGSLTLSCAASASSVTLLSIAWYRQAPGKKRELVAGISTDGSTDYLHSVKGRFTISRDNAKNSVYLQMNSLRAEDTAVYYCYAYTWTTRLPYWGQGTLVTVTS

SEQ ID NO: 1742 - protein, 117 aa, synthetic construct; identical to SEQ ID NO: 1740
  REGION 1..117: note = Description of Artificial Sequence: Synthetic polypeptide

SEQ ID NO: 1743 - protein, 117 aa, synthetic construct
  REGION 1..117: note = Description of Artificial Sequence: Synthetic polypeptide
EVQLVESGGGLVQPGGSLTLSCAASGTSVWLLSMAWYRQAPGKKRELVAGISYDGSTVYVESVKGRFTISRDNAKNSVYLQMNSLRAEDTAVYYCYAYSWTTRQPYWGQGTLVTVSS

SEQ ID NO: 1744 - protein, 117 aa, synthetic construct
  REGION 1..117: note = Description of Artificial Sequence: Synthetic polypeptide
EVQLVESGGGLVQPGGSLTLSCAASGSSVSILSIAWYRQAPGKKRELVAGISDDGSTVYIDSVKGRFTISRDNAKNSVYLQMNSLRAEDTAVYYCYAYVWGTRLPYWGQGTLVTVSS

SEQ ID NO: 1745 - protein, 117 aa, synthetic construct
  REGION 1..117: note = Description of Artificial Sequence: Synthetic polypeptide
EVQLVESGGGLVQPGGSLTLSCAASGTAVSNLSIAWYRQAPGKKRELVAGISDDGSTVYVDSVKGRFTISRDNAKNSVYLQMNSLRAEDTAVYYCYAYEWTNALPYWGQGTLVTVSS

SEQ ID NO: 1746 - protein, 117 aa, synthetic construct
  REGION 1..117: note = Description of Artificial Sequence: Synthetic polypeptide
EVQLVESGGGLVQPGGSLTLSCAASGSAVSMLSLAWYRQAPGKKRELVAGISDDGSQVYIDSVKGRFTISRDNAKNSVYLQMNSLRAEDTAVYYCYAYRWEDALTYWGQGTLVTVSS

SEQ ID NO: 1747 - protein, 117 aa, synthetic construct
  REGION 1..117: note = Description of Artificial Sequence: Synthetic polypeptide
EVQLVESGGGLVQPGGSLTLSCAASGMTVFFLSMAWYRQAPGKKRELVAGISVDGSTVYSDSVKGRFTISRDNAKNSVYLQMNSLRAEDTAVYYCYAYSWTTRYPYWGQGTLVTVSS

SEQ ID NO: 1748 - protein, 117 aa, synthetic construct
  REGION 1..117: note = Description of Artificial Sequence: Synthetic polypeptide
EVQLVESGGGLVQPGGSLTLSCAASQYSVTFLSVAWYRQAPGKKRELVAGISDDGSNVYIDSVKGRFTISRDNAKNSVYLQMNSLRAEDTAVYYCYAYSWIDSLRYWGQGTLVTVSS

SEQ ID NO: 1749 - protein, 117 aa, synthetic construct
  REGION 1..117: note = Description of Artificial Sequence: Synthetic polypeptide
EVQLVESGGGLVQPGGSLTLSCAASGETVSFLSLAWYRQAPGKKRELVAGISTDGSTVYFVSVKGRFTISRDNAKNSVYLQMNSLRAEDTAVYYCYAYSWTTPRAYWGQGTLVTVSS

SEQ ID NO: 1750 - protein, 117 aa, synthetic construct
  REGION 1..117: note = Description of Artificial Sequence: Synthetic polypeptide
EVQLVESGGGLVQPGGSLTLSCAASLSSVSVLSIAWYRQAPGKKRELVAGISTDGSTVYIDSVKGRFTISRDNAKNSVYLQMNSLRAEDTAVYYCYAYSWTTSLPYWGQGTLVTVSS

SEQ ID NO: 1751 - protein, 10 aa, synthetic construct
  REGION 1..10: note = Description of Artificial Sequence: Synthetic peptide
GSIFSIASMG

SEQ ID NO: 1752 - protein, 10 aa, synthetic construct
  REGION 1..10: note = Description of Artificial Sequence: Synthetic peptide
GSIFSIASMG

SEQ ID NO: 1753 - protein, 10 aa, synthetic construct
  REGION 1..10: note = Description of Artificial Sequence: Synthetic peptide
GSIFSIASMA

SEQ ID NO: 1754 - protein, 10 aa, synthetic construct
  REGION 1..10: note = Description of Artificial Sequence: Synthetic peptide
ESIFSINVMA

SEQ ID NO: 1755 - protein, 10 aa, synthetic construct
  REGION 1..10: note = Description of Artificial Sequence: Synthetic peptide
GSSFSITSMA

SEQ ID NO: 1756 - protein, 10 aa, synthetic construct
  REGION 1..10: note = Description of Artificial Sequence: Synthetic peptide
SSIFSISSMS

SEQ ID NO: 1757 - protein, 10 aa, synthetic construct
  REGION 1..10: note = Description of Artificial Sequence: Synthetic peptide
SSIFSISSMS

SEQ ID NO: 1758 - protein, 10 aa, synthetic construct
  REGION 1..10: note = Description of Artificial Sequence: Synthetic peptide
GSTLNIKIMA

SEQ ID NO: 1759 - protein, 10 aa, synthetic construct
  REGION 1..10: note = Description of Artificial Sequence: Synthetic peptide
GSTLNIKIMA

SEQ ID NO: 1760 - protein, 10 aa, synthetic construct
  REGION 1..10: note = Description of Artificial Sequence: Synthetic peptide
GSTFNIKTMA

SEQ ID NO: 1761 - protein, 10 aa, synthetic construct
  REGION 1..10: note = Description of Artificial Sequence: Synthetic peptide
GSTFNIKLMA

SEQ ID NO: 1762 - protein, 10 aa, synthetic construct
  REGION 1..10: note = Description of Artificial Sequence: Synthetic peptide
GSTFNFKIMA

SEQ ID NO: 1763 - protein, 10 aa, synthetic construct
  REGION 1..10: note = Description of Artificial Sequence: Synthetic peptide
GFMFSSYSMS

SEQ ID NO: 1764 - protein, 10 aa, synthetic construct
  REGION 1..10: note = Description of Artificial Sequence: Synthetic peptide
GFMFSSYSMS

SEQ ID NO: 1765 - protein, 10 aa, synthetic construct
  REGION 1..10: note = Description of Artificial Sequence: Synthetic peptide
GFTFSSHSMS

SEQ ID NO: 1766 - protein, 10 aa, synthetic construct
  REGION 1..10: note = Description of Artificial Sequence: Synthetic peptide
GSSFSHNTMG

SEQ ID NO: 1767 - protein, 10 aa, synthetic construct
  REGION 1..10: note = Description of Artificial Sequence: Synthetic peptide
GGRFSYATMG

SEQ ID NO: 1768 - protein, 10 aa, synthetic construct
  REGION 1..10: note = Description of Artificial Sequence: Synthetic peptide
GSRFSYATMG

SEQ ID NO: 1769 - protein, 10 aa, synthetic construct
  REGION 1..10: note = Description of Artificial Sequence: Synthetic peptide
GSTFTSNVMG

SEQ ID NO: 1770 - protein, 10 aa, synthetic construct
  REGION 1..10: note = Description of Artificial Sequence: Synthetic peptide
GSSVSFLSMA

SEQ ID NO: 1771 - protein, 10 aa, synthetic construct
  REGION 1..10: note = Description of Artificial Sequence: Synthetic peptide
GSSVSFLSMA

SEQ ID NO: 1772 - protein, 10 aa, synthetic construct
  REGION 1..10: note = Description of Artificial Sequence: Synthetic peptide
GSSVSFLSMA

SEQ ID NO: 1773 - protein, 10 aa, synthetic construct
  REGION 1..10: note = Description of Artificial Sequence: Synthetic peptide
GSSVSFLSMA

SEQ ID NO: 1774 - protein, 10 aa, synthetic construct
  REGION 1..10: note = Description of Artificial Sequence: Synthetic peptide
GSSVSFLSMA

SEQ ID NO: 1775 - protein, 10 aa, synthetic construct
  REGION 1..10: note = Description of Artificial Sequence: Synthetic peptide
GSSVSFLSMA

SEQ ID NO: 1776 - protein, 10 aa, synthetic construct
  REGION 1..10: note = Description of Artificial Sequence: Synthetic peptide
GSSVSFLSMA

SEQ ID NO: 1777 - protein, 10 aa, synthetic construct
  REGION 1..10: note = Description of Artificial Sequence: Synthetic peptide
GSSVSFLSIA

SEQ ID NO: 1778 - protein, 10 aa, synthetic construct
  REGION 1..10: note = Description of Artificial Sequence: Synthetic peptide
GSSVSFLSMA

SEQ ID NO: 1779 - protein, 10 aa, synthetic construct
  REGION 1..10: note = Description of Artificial Sequence: Synthetic peptide
GSSVSFLSMA

SEQ ID NO: 1780 - protein, 10 aa, synthetic construct
  REGION 1..10: note = Description of Artificial Sequence: Synthetic peptide
GSSVSFLSMA

SEQ ID NO: 1781 - protein, 10 aa, synthetic construct
  REGION 1..10: note = Description of Artificial Sequence: Synthetic peptide
GSSVSFLSMA

SEQ ID NO: 1782 - protein, 10 aa, synthetic construct
  REGION 1..10: note = Description of Artificial Sequence: Synthetic peptide
GSSVSFLSMA

SEQ ID NO: 1783 - protein, 10 aa, synthetic construct
  REGION 1..10: note = Description of Artificial Sequence: Synthetic peptide
GSSVSFLSMA

SEQ ID NO: 1784 - protein, 10 aa, synthetic construct
  REGION 1..10: note = Description of Artificial Sequence: Synthetic peptide
GFTLDYYAIG

SEQ ID NO: 1785 - protein, 10 aa, synthetic construct
  REGION 1..10: note = Description of Artificial Sequence: Synthetic peptide
GSTSSINAMG

SEQ ID NO: 1786 - protein, 10 aa, synthetic construct
  REGION 1..10: note = Description of Artificial Sequence: Synthetic peptide
GSTSSINAMG

SEQ ID NO: 1787 - protein, 10 aa, synthetic construct
  REGION 1..10: note = Description of Artificial Sequence: Synthetic peptide
GITSSVYSMG

SEQ ID NO: 1788 - protein, 10 aa, synthetic construct
  REGION 1..10: note = Description of Artificial Sequence: Synthetic peptide
GRTSMFNSMG

SEQ ID NO: 1789 - protein, 10 aa, synthetic construct
  REGION 1..10: note = Description of Artificial Sequence: Synthetic peptide
GRTSMVNSMG

SEQ ID NO: 1790 - protein, 10 aa, synthetic construct
  REGION 1..10: note = Description of Artificial Sequence: Synthetic peptide
GSVSMFNSMG

SEQ ID NO: 1791 - protein, 10 aa, synthetic construct
  REGION 1..10: note = Description of Artificial Sequence: Synthetic peptide
GSIFSIAVMG

SEQ ID NO: 1792 - protein, 10 aa, synthetic construct
  REGION 1..10: note = Description of Artificial Sequence: Synthetic peptide
SGIFSDMSMV

SEQ ID NO: 1793 - protein, 10 aa, synthetic construct
  REGION 1..10: note = Description of Artificial Sequence: Synthetic peptide
GSISSIIVMG

SEQ ID NO: 1794 - protein, 10 aa, synthetic construct
  REGION 1..10: note = Description of Artificial Sequence: Synthetic peptide
GSISSIIVMG

SEQ ID NO: 1795 - protein, 10 aa, synthetic construct
  REGION 1..10: note = Description of Artificial Sequence: Synthetic peptide
GSIFTTNSMG

SEQ ID NO: 1796 - protein, 9 aa, synthetic construct
  REGION 1..9: note = Description of Artificial Sequence: Synthetic peptide
GSREISTMG

SEQ ID NO: 1797 - protein, 9 aa, synthetic construct
  REGION 1..9: note = Description of Artificial Sequence: Synthetic peptide
GSREISTMG

SEQ ID NO: 1798 - protein, 9 aa, synthetic construct
  REGION 1..9: note = Description of Artificial Sequence: Synthetic peptide
GSREISTMG

SEQ ID NO: 1799 - protein, 9 aa, synthetic construct
  REGION 1..9: note = Description of Artificial Sequence: Synthetic peptide
GSREISTMG

SEQ ID NO: 1800 - protein, 10 aa, synthetic construct
  REGION 1..10: note = Description of Artificial Sequence: Synthetic peptide
GSIFRGAAMY

SEQ ID NO: 1801 - protein, 10 aa, synthetic construct
  REGION 1..10: note = Description of Artificial Sequence: Synthetic peptide
GSISSFNFMS

SEQ ID NO: 1802 - protein, 10 aa, synthetic construct
  REGION 1..10: note = Description of Artificial Sequence: Synthetic peptide
GTIFTASTMG

SEQ ID NO: 1803 - protein, 10 aa, synthetic construct
  REGION 1..10: note = Description of Artificial Sequence: Synthetic peptide
GSIFSIASMG

SEQ ID NO: 1804 - protein, 10 aa, synthetic construct
  REGION 1..10: note = Description of Artificial Sequence: Synthetic peptide
GRTSMFNSMG

SEQ ID NO: 1805 - protein, 10 aa, synthetic construct
  REGION 1..10: note = Description of Artificial Sequence: Synthetic peptide
GSSVSFLSMA

SEQ ID NO: 1806 - protein, 10 aa, synthetic construct
  REGION 1..10: note = Description of Artificial Sequence: Synthetic peptide
GSIFRGAAMY

SEQ ID NO: 1807 - protein, 10 aa, synthetic construct
  REGION 1..10: note = Description of Artificial Sequence: Synthetic peptide
GSTFNIKTMA

SEQ ID NO: 1808 - protein, 10 aa, synthetic construct
  REGION 1..10: note = Description of Artificial Sequence: Synthetic peptide
GSTLNIKIMA

SEQ ID NO: 1809 - protein, 10 aa, synthetic construct
  REGION 1..10: note = Description of Artificial Sequence: Synthetic peptide
SSIFSISSMS

SEQ ID NO: 1810 - protein, 10 aa, synthetic construct
  REGION 1..10: note = Description of Artificial Sequence: Synthetic peptide
GSTSSINAMG

SEQ ID NO: 1811 - protein, 10 aa, synthetic construct
  REGION 1..10: note = Description of Artificial Sequence: Synthetic peptide
GFMFSSYSMS

SEQ ID NO: 1812 - protein, 10 aa, synthetic construct
  REGION 1..10: note = Description of Artificial Sequence: Synthetic peptide
GSVSMFNSMG

SEQ ID NO: 1813 - protein, 10 aa, synthetic construct
  REGION 1..10: note = Description of Artificial Sequence: Synthetic peptide
GGRFSYATMG

SEQ ID NO: 1814 - protein, 10 aa, synthetic construct
  REGION 1..10: note = Description of Artificial Sequence: Synthetic peptide
GSISSFNFMS

SEQ ID NO: 1815 - protein, 10 aa, synthetic construct
  REGION 1..10: note = Description of Artificial Sequence: Synthetic peptide
ESIFSINVMA

SEQ ID NO: 1816 - protein, 9 aa, synthetic construct
  REGION 1..9: note = Description of Artificial Sequence: Synthetic peptide
GSREISTMG

SEQ ID NO: 1817 - protein, 10 aa, synthetic construct
  REGION 1..10: note = Description of Artificial Sequence: Synthetic peptide
GSIFSIAVMG

SEQ ID NO: 1818 - protein, 10 aa, synthetic construct
  REGION 1..10: note = Description of Artificial Sequence: Synthetic peptide
GSTSSINAMG

SEQ ID NO: 1819 - protein, 10 aa, synthetic construct
  REGION 1..10: note = Description of Artificial Sequence: Synthetic peptide
SGIFSDMSMV

SEQ ID NO: 1820 - protein, 10 aa, synthetic construct
  REGION 1..10: note = Description of Artificial Sequence: Synthetic peptide
GFMFSSYSMS

SEQ ID NO: 1821 - protein, 10 aa, synthetic construct
  REGION 1..10: note = Description of Artificial Sequence: Synthetic peptide
GSRFSYATMG

SEQ ID NO: 1822 - protein, 10 aa, synthetic construct
  REGION 1..10: note = Description of Artificial Sequence: Synthetic peptide
GSTFTSNVMG

SEQ ID NO: 1823 - protein, 10 aa, synthetic construct
  REGION 1..10: note = Description of Artificial Sequence: Synthetic peptide
GSSVSFLSMA

SEQ ID NO: 1824 - protein, 10 aa, synthetic construct
  REGION 1..10: note = Description of Artificial Sequence: Synthetic peptide
GSISSIIVMG

SEQ ID NO: 1825 - protein, 10 aa, synthetic construct
  REGION 1..10: note = Description of Artificial Sequence: Synthetic peptide
GSSVSFLSMA

SEQ ID NO: 1826 - protein, 10 aa, synthetic construct
  REGION 1..10: note = Description of Artificial Sequence: Synthetic peptide
GTIFTASTMG

SEQ ID NO: 1827 - protein, 10 aa, synthetic construct
  REGION 1..10: note = Description of Artificial Sequence: Synthetic peptide
GSSVSFLSMA

SEQ ID NO: 1828 - protein, 10 aa, synthetic construct
  REGION 1..10: note = Description of Artificial Sequence: Synthetic peptide
GSSFSHNTMG

SEQ ID NO: 1829 - protein, 10 aa, synthetic construct
  REGION 1..10: note = Description of Artificial Sequence: Synthetic peptide
GSISSIIVMG

SEQ ID NO: 1830 - protein, 10 aa, synthetic construct
  REGION 1..10: note = Description of Artificial Sequence: Synthetic peptide
GSSFSITSMA

SEQ ID NO: 1831 - protein, 10 aa, synthetic construct
  REGION 1..10: note = Description of Artificial Sequence: Synthetic peptide
GRTSMVNSMG

SEQ ID NO: 1832 - protein, 10 aa, synthetic construct
  REGION 1..10: note = Description of Artificial Sequence: Synthetic peptide
GSTFNFKIMA

SEQ ID NO: 1833 - protein, 10 aa, synthetic construct
  REGION 1..10: note = Description of Artificial Sequence: Synthetic peptide
GFTLDYYAIG

SEQ ID NO: 1834 - protein, 10 aa, synthetic construct
  REGION 1..10: note = Description of Artificial Sequence: Synthetic peptide
GSIFTTNSMG

SEQ ID NO: 1835 - protein, 10 aa, synthetic construct
  REGION 1..10: note = Description of Artificial Sequence: Synthetic peptide
GITSSVYSMG

SEQ ID NO: 1836 - protein, 10 aa, synthetic construct
  REGION 1..10: note = Description of Artificial Sequence: Synthetic peptide
SSIFSISSMS

SEQ ID NO: 1837 - protein, 10 aa, synthetic construct
  REGION 1..10: note = Description of Artificial Sequence: Synthetic peptide
GFTSSINAMG

SEQ ID NO: 1838 - protein, 10 aa, synthetic construct
  REGION 1..10: note = Description of Artificial Sequence: Synthetic peptide
GSTSSINAMA

SEQ ID NO: 1839 - protein, 10 aa, synthetic construct
  REGION 1..10: note = Description of Artificial Sequence: Synthetic peptide
GSTSSINAMG

SEQ ID NO: 1840 - protein, 10 aa, synthetic construct
  REGION 1..10: note = Description of Artificial Sequence: Synthetic peptide
GSPSSINAMG

SEQ ID NO: 1841 - protein, 10 aa, synthetic construct
  REGION 1..10: note = Description of Artificial Sequence: Synthetic peptide
GSTSSINAMG

SEQ ID NO: 1842 - protein, 10 aa, synthetic construct
  REGION 1..10: note = Description of Artificial Sequence: Synthetic peptide
GSISSINAMG

SEQ ID NO: 1843 - protein, 10 aa, synthetic construct
  REGION 1..10: note = Description of Artificial Sequence: Synthetic peptide
GSTSSINAMA

SEQ ID NO: 1844 - protein, 10 aa, synthetic construct
  REGION 1..10: note = Description of Artificial Sequence: Synthetic peptide
GSTSSINAYG

SEQ ID NO: 1845 - protein, 10 aa, synthetic construct
  REGION 1..10: note = Description of Artificial Sequence: Synthetic peptide
GSTSSINAIG

SEQ ID NO: 1846 - protein, 10 aa, synthetic construct
  REGION 1..10: note = Description of Artificial Sequence: Synthetic peptide
GSTSSINAMA

SEQ ID NO: 1847 - protein, 10 aa, synthetic construct
  REGION 1..10: note = Description of Artificial Sequence: Synthetic peptide
GSTSIINAMG

SEQ ID NO: 1848 - protein, 10 aa, synthetic construct
  REGION 1..10: note = Description of Artificial Sequence: Synthetic peptide
GSTSSINAMG

SEQ ID NO: 1849 - protein, 10 aa, synthetic construct
  REGION 1..10: note = Description of Artificial Sequence: Synthetic peptide
GKTSSINAMA

SEQ ID NO: 1850 - protein, 10 aa, synthetic construct
  REGION 1..10: note = Description of Artificial Sequence: Synthetic peptide
GTTSSINAMG

SEQ ID NO: 1851 - protein, 10 aa, synthetic construct
  REGION 1..10: note = Description of Artificial Sequence: Synthetic peptide
GSTSSINAMA

SEQ ID NO: 1852 - protein, 10 aa, synthetic construct
  REGION 1..10: note = Description of Artificial Sequence: Synthetic peptide
GSGSSINAMG

SEQ ID NO: 1853 - protein, 10 aa, synthetic construct
  REGION 1..10: note = Description of Artificial Sequence: Synthetic peptide
GTTSSINAMG

SEQ ID NO: 1854 - protein, 10 aa, synthetic construct
  REGION 1..10: note = Description of Artificial Sequence: Synthetic peptide
GSTSSINAMA

SEQ ID NO: 1855 - protein, 10 aa, synthetic construct
  REGION 1..10: note = Description of Artificial Sequence: Synthetic peptide
GSTSRINAMG

SEQ ID NO: 1856 - protein, 10 aa, synthetic construct
  REGION 1..10: note = Description of Artificial Sequence: Synthetic peptide
GSTSRINAMG

SEQ ID NO: 1857 - protein, 10 aa, synthetic construct
  REGION 1..10: note = Description of Artificial Sequence: Synthetic peptide
GSTSSINAMG

SEQ ID NO: 1858 - protein, 10 aa, synthetic construct
  REGION 1..10: note = Description of Artificial Sequence: Synthetic peptide
GSTSSINAMA

SEQ ID NO: 1859 - protein, 10 aa, synthetic construct
  REGION 1..10: note = Description of Artificial Sequence: Synthetic peptide
GSTSSINAMA

SEQ ID NO: 1860 - protein, 10 aa, synthetic construct
  REGION 1..10: note = Description of Artificial Sequence: Synthetic peptide
GNTSSINAMA

SEQ ID NO: 1861 - protein, 10 aa, synthetic construct
  REGION 1..10: note = Description of Artificial Sequence: Synthetic peptide
GSTSSINAMA

SEQ ID NO: 1862 - protein, 10 aa, synthetic construct
  REGION 1..10: note = Description of Artificial Sequence: Synthetic peptide
GSTSIINAMG

SEQ ID NO: 1863 - protein, 10 aa, synthetic construct
  REGION 1..10: note = Description of Artificial Sequence: Synthetic peptide
GSTSSINAMA

SEQ ID NO: 1864 - protein, 10 aa, synthetic construct
  REGION 1..10: note = Description of Artificial Sequence: Synthetic peptide
GSTSRINAMG

SEQ ID NO: 1865 - protein, 10 aa, synthetic construct
  REGION 1..10: note = Description of Artificial Sequence: Synthetic peptide
GSTSRINAMG

SEQ ID NO: 1866 - protein, 10 aa, synthetic construct
  REGION 1..10: note = Description of Artificial Sequence: Synthetic peptide
GTTSSINAMG

SEQ ID NO: 1867 - protein, 10 aa, synthetic construct
  REGION 1..10: note = Description of Artificial Sequence: Synthetic peptide
GITSSINAMG

SEQ ID NO: 1868 - protein, 10 aa, synthetic construct
  REGION 1..10: note = Description of Artificial Sequence: Synthetic peptide
GSTSDINAMG

SEQ ID NO: 1869 - protein, 10 aa, synthetic construct
  REGION 1..10: note = Description of Artificial Sequence: Synthetic peptide
GSTSSINAMA

SEQ ID NO: 1870 - protein, 10 aa, synthetic construct
  REGION 1..10: note = Description of Artificial Sequence: Synthetic peptide
GSTSSINAIG

SEQ ID NO: 1871 - protein, 10 aa, synthetic construct
  REGION 1..10: note = Description of Artificial Sequence: Synthetic peptide
GSTSSKNAMG

SEQ ID NO: 1872 - protein, 10 aa, synthetic construct
  REGION 1..10: note = Description of Artificial Sequence: Synthetic peptide
GSTSSINAMG

SEQ ID NO: 1873 - protein, 10 aa, synthetic construct
  REGION 1..10: note = Description of Artificial Sequence: Synthetic peptide
GLTSSINAMG

SEQ ID NO: 1874 - protein, 10 aa, synthetic construct
  REGION 1..10: note = Description of Artificial Sequence: Synthetic peptide
GSTSSINAMA

SEQ ID NO: 1875 - protein, 10 aa, synthetic construct
  REGION 1..10: note = Description of Artificial Sequence: Synthetic peptide
GSTSSNNAMA

SEQ ID NO: 1876 - protein, 10 aa, synthetic construct
  REGION 1..10: note = Description of Artificial Sequence: Synthetic peptide
GSTSSINAMA

SEQ ID NO: 1877 - protein, 10 aa, synthetic construct
  REGION 1..10: note = Description of Artificial Sequence: Synthetic peptide
GSTSHINAMG

SEQ ID NO: 1878 - protein, 10 aa, synthetic construct
  REGION 1..10: note = Description of Artificial Sequence: Synthetic peptide
GQTSSINAMG

SEQ ID NO: 1879 - protein, 10 aa, synthetic construct
  REGION 1..10: note = Description of Artificial Sequence: Synthetic peptide
GSTSRINGMG

SEQ ID NO: 1880 - protein, 10 aa, synthetic construct
  REGION 1..10: note = Description of Artificial Sequence: Synthetic peptide
GSTSVINAMA

SEQ ID NO: 1881 - protein, 10 aa, synthetic construct
  REGION 1..10: note = Description of Artificial Sequence: Synthetic peptide
GSTSSINAMA

SEQ ID NO: 1882 - protein, 10 aa, synthetic construct
  REGION 1..10: note = Description of Artificial Sequence: Synthetic peptide
GKTSSINAMG

SEQ ID NO: 1883 - protein, 10 aa, synthetic construct
  REGION 1..10: note = Description of Artificial Sequence: Synthetic peptide
GSTSSINAMA

SEQ ID NO: 1884 - protein, 10 aa, synthetic construct
  REGION 1..10: note = Description of Artificial Sequence: Synthetic peptide
GSVSSINAMG

SEQ ID NO: 1885 - protein, 10 aa, synthetic construct
  REGION 1..10: note = Description of Artificial Sequence: Synthetic peptide
GNTSSINAMG

SEQ ID NO: 1886 - protein, 10 aa, synthetic construct
  REGION 1..10: note = Description of Artificial Sequence: Synthetic peptide
GSTSSTNAMG

SEQ ID NO: 1887 - protein, 10 aa, synthetic construct
  REGION 1..10: note = Description of Artificial Sequence: Synthetic peptide
GSTSSINAMG

SEQ ID NO: 1888 - protein, 10 aa, synthetic construct
  REGION 1..10: note = Description of Artificial Sequence: Synthetic peptide
GSTSSINAMA

SEQ ID NO: 1889 - protein, 10 aa, synthetic construct
  REGION 1..10: note = Description of Artificial Sequence: Synthetic peptide
GGTSSINAMG

SEQ ID NO: 1890 - protein, 10 aa, synthetic construct
  REGION 1..10: note = Description of Artificial Sequence: Synthetic peptide
GSTRSINAMG

SEQ ID NO: 1891 - protein, 10 aa, synthetic construct
  REGION 1..10: note = Description of Artificial Sequence: Synthetic peptide
GTTSSINAMG

SEQ ID NO: 1892 - protein, 10 aa, synthetic construct
  REGION 1..10: note = Description of Artificial Sequence: Synthetic peptide
GSTSSINAMG

SEQ ID NO: 1893 - protein, 10 aa, synthetic construct
  REGION 1..10: note = Description of Artificial Sequence: Synthetic peptide
GSTSSINAMA

SEQ ID NO: 1894 - protein, 10 aa, synthetic construct
  REGION 1..10: note = Description of Artificial Sequence: Synthetic peptide
GNTSSINAMG

SEQ ID NO: 1895 - protein, 10 aa, synthetic construct
  REGION 1..10: note = Description of Artificial Sequence: Synthetic peptide
GSTSRINAMG

SEQ ID NO: 1896 - protein, 10 aa, synthetic construct
  REGION 1..10: note = Description of Artificial Sequence: Synthetic peptide
GSTSSINAIG

SEQ ID NO: 1897 - protein, 10 aa, synthetic construct
  REGION 1..10: note = Description of Artificial Sequence: Synthetic peptide
GLTSSINAMG

SEQ ID NO: 1898 - protein, 10 aa, synthetic construct
  REGION 1..10: note = Description of Artificial Sequence: Synthetic peptide
GSTSSINAMA

SEQ ID NO: 1899 - protein, 10 aa, synthetic construct
  REGION 1..10: note = Description of Artificial Sequence: Synthetic peptide
GSTSSTNAMG

SEQ ID NO: 1900 - protein, 10 aa, synthetic construct
  REGION 1..10: note = Description of Artificial Sequence: Synthetic peptide
GSTSSINAIG

SEQ ID NO: 1901 - protein, 10 aa, synthetic construct
  REGION 1..10: note = Description of Artificial Sequence: Synthetic peptide
GSTSSINAIG

SEQ ID NO: 1902 - protein, 10 aa, synthetic construct
  REGION 1..10: note = Description of Artificial Sequence: Synthetic peptide
GSTSSINAMG

SEQ ID NO: 1903 - protein, 10 aa, synthetic construct
  REGION 1..10: note = Description of Artificial Sequence: Synthetic peptide
GSTSSINAMG

SEQ ID NO: 1904 - protein, 10 aa, synthetic construct
  REGION 1..10: note = Description of Artificial Sequence: Synthetic peptide
GSTSSINAMA

SEQ ID NO: 1905 - protein, 10 aa, synthetic construct
  REGION 1..10: note = Description of Artificial Sequence: Synthetic peptide
GSTSSINAMA

SEQ ID NO: 1906 - protein, 10 aa, synthetic construct
  REGION 1..10: note = Description of Artificial Sequence: Synthetic peptide
GSKSSINAMG

SEQ ID NO: 1907 - protein, 10 aa, synthetic construct
  REGION 1..10: note = Description of Artificial Sequence: Synthetic peptide
GTTSSINAMG

SEQ ID NO: 1908 - protein, 10 aa, synthetic construct
  REGION 1..10: note = Description of Artificial Sequence: Synthetic peptide
GSTSSINAFG

SEQ ID NO: 1909 - protein, 10 aa, synthetic construct
  REGION 1..10: note = Description of Artificial Sequence: Synthetic peptide
GSTFSINAMG

SEQ ID NO: 1910 - protein, 10 aa, synthetic construct
  REGION 1..10: note = Description of Artificial Sequence: Synthetic peptide
GSTRSINAMG

SEQ ID NO: 1911 - protein, 10 aa, synthetic construct
  REGION 1..10: note = Description of Artificial Sequence: Synthetic peptide
GSTSSINAIG

SEQ ID NO: 1912 - protein, 10 aa, synthetic construct
  REGION 1..10: note = Description of Artificial Sequence: Synthetic peptide
GSTSSINAMG

SEQ ID NO: 1913 - protein, 10 aa, synthetic construct
  REGION 1..10: note = Description of Artificial Sequence: Synthetic peptide
GSTSSINAMG

SEQ ID NO: 1914 - protein, 10 aa, synthetic construct
  REGION 1..10: note = Description of Artificial Sequence: Synthetic peptide
GTTSSINAMG

SEQ ID NO: 1915 - protein, 10 aa, synthetic construct
  REGION 1..10: note = Description of Artificial Sequence: Synthetic peptide
GSTSSINAMA

SEQ ID NO: 1916 - protein, 10 aa, synthetic construct
  REGION 1..10: note = Description of Artificial Sequence: Synthetic peptide
GRTSSINAMG

SEQ ID NO: 1917 - protein, 10 aa, synthetic construct
  REGION 1..10: note = Description of Artificial Sequence: Synthetic peptide
GSTSSRNAMG

SEQ ID NO: 1918 - protein, 10 aa, synthetic construct
  REGION 1..10: note = Description of Artificial Sequence: Synthetic peptide
GSTKSINAMG

SEQ ID NO: 1919 - protein, 10 aa, synthetic construct
  REGION 1..10: note = Description of Artificial Sequence: Synthetic peptide
GSTSSRNAMG

SEQ ID NO: 1920 - protein, 10 aa, synthetic construct
  REGION 1..10: note = Description of Artificial Sequence: Synthetic peptide
GSTSSINAIG

SEQ ID NO: 1921 - protein, 10 aa, synthetic construct
  REGION 1..10: note = Description of Artificial Sequence: Synthetic peptide
GSTSLINAMG

SEQ ID NO: 1922 - protein, 10 aa, synthetic construct
  REGION 1..10: note = Description of Artificial Sequence: Synthetic peptide
GSTSSINAMA

SEQ ID NO: 1923 - protein, 10 aa, synthetic construct
  REGION 1..10: note = Description of Artificial Sequence: Synthetic peptide
GSTSSINAMG

SEQ ID NO: 1924 - protein, 10 aa, synthetic construct
  REGION 1..10: note = Description of Artificial Sequence: Synthetic peptide
GTTSSINAMG

SEQ ID NO: 1925 - protein, 10 aa, synthetic construct
  REGION 1..10: note = Description of Artificial Sequence: Synthetic peptide
GSTSSINAFG

SEQ ID NO: 1926 - protein, 10 aa, synthetic construct
  REGION 1..10: note = Description of Artificial Sequence: Synthetic peptide
GSTSSRNAMG

SEQ ID NO: 1927 - protein, 10 aa, synthetic construct
  REGION 1..10: note = Description of Artificial Sequence: Synthetic peptide
GNTSSINAMG

SEQ ID NO: 1928 - protein, 10 aa, synthetic construct
  REGION 1..10: note = Description of Artificial Sequence: Synthetic peptide
GTTSSINAMG

SEQ ID NO: 1929 - protein, 10 aa, synthetic construct
  REGION 1..10: note = Description of Artificial Sequence: Synthetic peptide
GSTASINAMG

SEQ ID NO: 1930 - protein, 10 aa, synthetic construct
  REGION 1..10: note = Description of Artificial Sequence: Synthetic peptide
GSTSSINAVG

SEQ ID NO: 1931 - protein, 10 aa, synthetic construct
  REGION 1..10: note = Description of Artificial Sequence: Synthetic peptide
GSTSSRNAMG

SEQ ID NO: 1932 - protein, 10 aa, synthetic construct
  REGION 1..10: note = Description of Artificial Sequence: Synthetic peptide
GSTNSINAMG

SEQ ID NO: 1933 - protein, 10 aa, synthetic construct
  REGION 1..10: note = Description of Artificial Sequence: Synthetic peptide
GSTSSINAMA

SEQ ID NO: 1934 - protein, 10 aa, synthetic construct
  REGION 1..10: note = Description of Artificial Sequence: Synthetic peptide
GSTSRINAMG

SEQ ID NO: 1935 - protein, 10 aa, synthetic construct
  REGION 1..10: note = Description of Artificial Sequence: Synthetic peptide
GSTSNINAMG

SEQ ID NO: 1936 - protein, 10 aa, synthetic construct
  REGION 1..10: note = Description of Artificial Sequence: Synthetic peptide
GSTSKINAMG

SEQ ID NO: 1937 - protein, 10 aa, synthetic construct
  REGION 1..10: note = Description of Artificial Sequence: Synthetic peptide
GSTSSINALG

SEQ ID NO: 1938 - protein, 10 aa, synthetic construct
  REGION 1..10: note = Description of Artificial Sequence: Synthetic peptide
GKTSSINAMG

SEQ ID NO: 1939 - protein, 10 aa, synthetic construct
  REGION 1..10: note = Description of Artificial Sequence: Synthetic peptide
GSTSSINAVG

SEQ ID NO: 1940 - protein, 10 aa, synthetic construct
  REGION 1..10: note = Description of Artificial Sequence: Synthetic peptide
GSTSRINAMG

SEQ ID NO: 1941 - protein, 10 aa, synthetic construct
  REGION 1..10: note = Description of Artificial Sequence: Synthetic peptide
GSTSSINAMG

SEQ ID NO: 1942 - protein, 10 aa, synthetic construct
  REGION 1..10: note = Description of Artificial Sequence: Synthetic peptide
GSTSSINAVG

SEQ ID NO: 1943 - protein, 10 aa, synthetic construct
  REGION 1..10: note = Description of Artificial Sequence: Synthetic peptide
GTTSSINAMG

SEQ ID NO: 1944 - protein, 10 aa, synthetic construct
  REGION 1..10: note = Description of Artificial Sequence: Synthetic peptide
GSTSSINAMG

SEQ ID NO: 1945 - protein, 10 aa, synthetic construct
  REGION 1..10: note = Description of Artificial Sequence: Synthetic peptide
GTTSSINAMG

SEQ ID NO: 1946 - protein, 10 aa, synthetic construct
  REGION 1..10: note = Description of Artificial Sequence: Synthetic peptide
GKTSSINAMG

SEQ ID NO: 1947 - protein, 10 aa, synthetic construct
  REGION 1..10: note = Description of Artificial Sequence: Synthetic peptide
GSTSSINAMG

SEQ ID NO: 1948 - protein, 10 aa, synthetic construct
  REGION 1..10: note = Description of Artificial Sequence: Synthetic peptide
GSTSAINAMG

SEQ ID NO: 1949 - protein, 10 aa, synthetic construct
  REGION 1..10: note = Description of Artificial Sequence: Synthetic peptide
GSPSSINAYG

SEQ ID NO: 1950 - protein, 10 aa, synthetic construct
  REGION 1..10: note = Description of Artificial Sequence: Synthetic peptide
GSTSSINAMG

SEQ ID NO: 1951 - protein, 10 aa, synthetic construct
  REGION 1..10: note = Description of Artificial Sequence: Synthetic peptide
GSRSSINAMG

SEQ ID NO: 1952 - protein, 10 aa, synthetic construct
  REGION 1..10: note = Description of Artificial Sequence: Synthetic peptide
GSVSSINAMG

SEQ ID NO: 1953 - protein, 10 aa, synthetic construct
  REGION 1..10: note = Description of Artificial Sequence: Synthetic peptide
GSTSSINAMA

SEQ ID NO: 1954 - protein, 10 aa, synthetic construct
  REGION 1..10: note = Description of Artificial Sequence: Synthetic peptide
GSTSSINAIG

SEQ ID NO: 1955 - protein, 10 aa, synthetic construct
  REGION 1..10: note = Description of Artificial Sequence: Synthetic peptide
GSTSSINAMG

SEQ ID NO: 1956 - protein, 10 aa, synthetic construct
  REGION 1..10: note = Description of Artificial Sequence: Synthetic peptide
GSTSSINAVG

SEQ ID NO: 1957 - protein, 10 aa, synthetic construct
  REGION 1..10: note = Description of Artificial Sequence: Synthetic peptide
GSTSSINAMA

SEQ ID NO: 1958 - protein, 10 aa, synthetic construct
  REGION 1..10: note = Description of Artificial Sequence: Synthetic peptide
GSTSSINAYG

SEQ ID NO: 1959 - protein, 10 aa, synthetic construct
  REGION 1..10: note = Description of Artificial Sequence: Synthetic peptide
GSTSSINAVG

SEQ ID NO: 1960 - protein, 10 aa, synthetic construct
  REGION 1..10: note = Description of Artificial Sequence: Synthetic peptide
GSKSSINAMG

SEQ ID NO: 1961 - protein, 10 aa, synthetic construct
  REGION 1..10: note = Description of Artificial Sequence: Synthetic peptide
GSTSSINAMA

SEQ ID NO: 1962 - protein, 10 aa, synthetic construct
  REGION 1..10: note = Description of Artificial Sequence: Synthetic peptide
GSVSSINAMG

SEQ ID NO: 1963 - protein, 10 aa, synthetic construct
  REGION 1..10: note = Description of Artificial Sequence: Synthetic peptide
GSTSSINAMG

SEQ ID NO: 1964 - protein, 10 aa, synthetic construct
  REGION 1..10: note = Description of Artificial Sequence: Synthetic peptide
GSTSSINAMG

SEQ ID NO: 1965 - protein, 10 aa, synthetic construct
  REGION 1..10: note = Description of Artificial Sequence: Synthetic peptide
GSTSSINAMA

SEQ ID NO: 1966 - protein, 10 aa, synthetic construct
  REGION 1..10: note = Description of Artificial Sequence: Synthetic peptide
GSTSYINAMG

SEQ ID NO: 1967 - protein, 10 aa, synthetic construct
  REGION 1..10: note = Description of Artificial Sequence: Synthetic peptide
GSTSSINAMG

SEQ ID NO: 1968 - protein, 10 aa, synthetic construct
  REGION 1..10: note = Description of Artificial Sequence: Synthetic peptide
GSTSSINAMG

SEQ ID NO: 1969 - protein, 10 aa, synthetic construct
  REGION 1..10: note = Description of Artificial Sequence: Synthetic peptide
GSTSSINAMG

SEQ ID NO: 1970 - protein, 10 aa, synthetic construct
  REGION 1..10: note = Description of Artificial Sequence: Synthetic peptide
GSTSRINAMG

SEQ ID NO: 1971 - protein, 10 aa, synthetic construct
  REGION 1..10: note = Description of Artificial Sequence: Synthetic peptide
GSTSSINAMA

SEQ ID NO: 1972 - protein, 10 aa, synthetic construct
  REGION 1..10: note = Description of Artificial Sequence: Synthetic peptide
GSTSSINAMA

SEQ ID NO: 1973 - protein, 10 aa, synthetic construct
  REGION 1..10: note = Description of Artificial Sequence: Synthetic peptide
GSTSSINAMG

SEQ ID NO: 1974 - protein, 10 aa, synthetic construct
  REGION 1..10: note = Description of Artificial Sequence: Synthetic peptide
GSTSTINAMG

SEQ ID NO: 1975 - protein, 10 aa, synthetic construct
  REGION 1..10: note = Description of Artificial Sequence: Synthetic peptide
GSTSSINAVG

SEQ ID NO: 1976 - protein, 10 aa, synthetic construct
  REGION 1..10: note = Description of Artificial Sequence: Synthetic peptide
GSTSSINAMG

SEQ ID NO: 1977 - protein, 10 aa, synthetic construct
  REGION 1..10: note = Description of Artificial Sequence: Synthetic peptide
GSPSSINAYG

SEQ ID NO: 1978 - protein, 10 aa, synthetic construct
  REGION 1..10: note = Description of Artificial Sequence: Synthetic peptide
GSPSSINAYG

SEQ ID NO: 1979 - protein, 10 aa, synthetic construct
  REGION 1..10: note = Description of Artificial Sequence: Synthetic peptide
GSSVKFLSMA

SEQ ID NO: 1980 - protein, 10 aa, synthetic construct
  REGION 1..10: note = Description of Artificial Sequence: Synthetic peptide
GSSVSFLSLA

SEQ ID NO: 1981 - protein, 10 aa, synthetic construct
  REGION 1..10: note = Description of Artificial Sequence: Synthetic peptide
GSRVSFLSMA

SEQ ID NO: 1982 - protein, 10 aa, synthetic construct
  REGION 1..10: note = Description of Artificial Sequence: Synthetic peptide
GSQVSFLSMA

SEQ ID NO: 1983 - protein, 10 aa, synthetic construct
  REGION 1..10: note = Description of Artificial Sequence: Synthetic peptide
GSSVSFLSMA

SEQ ID NO: 1984 - protein, 10 aa, synthetic construct
  REGION 1..10: note = Description of Artificial Sequence: Synthetic peptide
GSKVSFLSMA

SEQ ID NO: 1985 - protein, 10 aa, synthetic construct
  REGION 1..10: note = Description of Artificial Sequence: Synthetic peptide
GSSVGFLSMA

SEQ ID NO: 1986 - protein, 10 aa, synthetic construct
  REGION 1..10: note = Description of Artificial Sequence: Synthetic peptide
GSSVSFLSMA

SEQ ID NO: 1987 - protein, 10 aa, synthetic construct
  REGION 1..10: note = Description of Artificial Sequence: Synthetic peptide
GSRVSFLSMA

SEQ ID NO: 1988 - protein, 10 aa, synthetic construct
  REGION 1..10: note = Description of Artificial Sequence: Synthetic peptide
GSSVSFLSLA

SEQ ID NO: 1989 - protein, 10 aa, synthetic construct
  REGION 1..10: note = Description of Artificial Sequence: Synthetic peptide
GSSVSFLSMA

SEQ ID NO: 1990 - protein, 10 aa, synthetic construct
  REGION 1..10: note = Description of Artificial Sequence: Synthetic peptide
GSSVQFLSMA

SEQ ID NO: 1991 - protein, 10 aa, synthetic construct
  REGION 1..10: note = Description of Artificial Sequence: Synthetic peptide
GSNVSFLSMA

SEQ ID NO: 1992 - protein, 10 aa, synthetic construct
  REGION 1..10: note = Description of Artificial Sequence: Synthetic peptide
GSSVKFLSMA

SEQ ID NO: 1993 - protein, 10 aa, synthetic construct
  REGION 1..10: note = Description of Artificial Sequence: Synthetic peptide
GKSVSFLSMA

SEQ ID NO: 1994 - protein, 10 aa, synthetic construct
  REGION 1..10: note = Description of Artificial Sequence: Synthetic peptide
GSRVSFLSMA

SEQ ID NO: 1995 - protein, 10 aa, synthetic construct
  REGION 1..10: note = Description of Artificial Sequence: Synthetic peptide
GSHVSFLSMA

SEQ ID NO: 1996 - protein, 10 aa, synthetic construct
  REGION 1..10: note = Description of Artificial Sequence: Synthetic peptide
GSSVSFLSMA

SEQ ID NO: 1997 - protein, 10 aa, synthetic construct
  REGION 1..10: note = Description of Artificial Sequence: Synthetic peptide
GSSVSFLSMA

SEQ ID NO: 1998 - protein, 10 aa, synthetic construct
  REGION 1..10: note = Description of Artificial Sequence: Synthetic peptide
GSSVRFLSMA

SEQ ID NO: 1999 - protein, 10 aa, synthetic construct
  REGION 1..10: note = Description of Artificial Sequence: Synthetic peptide
GSSVRFLSMA

SEQ ID NO: 2000 - protein, 10 aa, synthetic construct
  REGION 1..10: note = Description of Artificial Sequence: Synthetic peptide
GSSVRFLSMA

SEQ ID NO: 2001 - protein, 10 aa, synthetic construct
  REGION 1..10: note = Description of Artificial Sequence: Synthetic peptide
GSHVSFLSMA

SEQ ID NO: 2002 - protein, 10 aa, synthetic construct
  REGION 1..10: note = Description of Artificial Sequence: Synthetic peptide
GTSVSFLSMA

SEQ ID NO: 2003 - protein, 10 aa, synthetic construct
  REGION 1..10: note = Description of Artificial Sequence: Synthetic peptide
GTSVSFLSIA

SEQ ID NO: 2004 - protein, 10 aa, synthetic construct
  REGION 1..10: note = Description of Artificial Sequence: Synthetic peptide
GSSVKFLSMA

SEQ ID NO: 2005 - protein, 10 aa, synthetic construct
  REGION 1..10: note = Description of Artificial Sequence: Synthetic peptide
GSSVSFLSMA

SEQ ID NO: 2006 - protein, 10 aa, synthetic construct
  REGION 1..10: note = Description of Artificial Sequence: Synthetic peptide
GSSVRFLSMA

SEQ ID NO: 2007 - protein, 10 aa, synthetic construct
  REGION 1..10: note = Description of Artificial Sequence: Synthetic peptide
GSSVSFLSMA

SEQ ID NO: 2008 - protein, 10 aa, synthetic construct
  REGION 1..10: note = Description of Artificial Sequence: Synthetic peptide
GSSVRFLSMA

SEQ ID NO: 2009 - protein, 10 aa, synthetic construct
  REGION 1..10: note = Description of Artificial Sequence: Synthetic peptide
GSSVVFLSMA

SEQ ID NO: 2010 - protein, 10 aa, synthetic construct
  REGION 1..10: note = Description of Artificial Sequence: Synthetic peptide
GSSVRFLSMA

SEQ ID NO: 2011 - protein, 10 aa, synthetic construct
  REGION 1..10: note = Description of Artificial Sequence: Synthetic peptide
GSSVRFLSMA

SEQ ID NO: 2012 - protein, 10 aa, synthetic construct
  REGION 1..10: note = Description of Artificial Sequence: Synthetic peptide
GSSVRFLSMA

SEQ ID NO: 2013 - protein, 10 aa, synthetic construct
  REGION 1..10: note = Description of Artificial Sequence: Synthetic peptide
GSSVSRLSMA

SEQ ID NO: 2014 - protein, 10 aa, synthetic construct
  REGION 1..10: note = Description of Artificial Sequence: Synthetic peptide
GSSKSFLSMA

SEQ ID NO: 2015 - protein, 10 aa, synthetic construct
  REGION 1..10: note = Description of Artificial Sequence: Synthetic peptide
GSSVSRLSMA

SEQ ID NO: 2016 - protein, 10 aa, synthetic construct
  REGION 1..10: note = Description of Artificial Sequence: Synthetic peptide
GSSVKFLSMA

SEQ ID NO: 2017 - protein, 10 aa, synthetic construct
  REGION 1..10: note = Description of Artificial Sequence: Synthetic peptide
GSGVRFLSMA

SEQ ID NO: 2018 - protein, 10 aa, synthetic construct
  REGION 1..10: note = Description of Artificial Sequence: Synthetic peptide
GSSVRFLSMA

SEQ ID NO: 2019 - protein, 10 aa, synthetic construct
  REGION 1..10: note = Description of Artificial Sequence: Synthetic peptide
GSSVHFLSMA

SEQ ID NO: 2020 - protein, 10 aa, synthetic construct
  REGION 1..10: note = Description of Artificial Sequence: Synthetic peptide
GSSVRFLSMA

SEQ ID NO: 2021 - protein, 10 aa, synthetic construct
  REGION 1..10: note = Description of Artificial Sequence: Synthetic peptide
GSKVSFLSMA

SEQ ID NO: 2022 - protein, 10 aa, synthetic construct
  REGION 1..10: note = Description of Artificial Sequence: Synthetic peptide
GSSVSFLSMA

SEQ ID NO: 2023 - protein, 10 aa, synthetic construct
  REGION 1..10: note = Description of Artificial Sequence: Synthetic peptide
GSKVSFLSMA

SEQ ID NO: 2024 - protein, 10 aa, synthetic construct
  REGION 1..10: note = Description of Artificial Sequence: Synthetic peptide
GSRVSFLSMA

SEQ ID NO: 2025 - protein, 10 aa, synthetic construct
  REGION 1..10: note = Description of Artificial Sequence: Synthetic peptide
GSRVSFLSMA

SEQ ID NO: 2026 - protein, 10 aa, synthetic construct
  REGION 1..10: note = Description of Artificial Sequence: Synthetic peptide
GSSVRFLSMA

SEQ ID NO: 2027 - protein, 10 aa, synthetic construct
  REGION 1..10: note = Description of Artificial Sequence: Synthetic peptide
YSSVSRLSMA

SEQ ID NO: 2028 - protein, 10 aa, synthetic construct
  REGION 1..10: note = Description of Artificial Sequence: Synthetic peptide
GSSVSFLSMA

SEQ ID NO: 2029 - protein, 10 aa, synthetic construct
  REGION 1..10: note = Description of Artificial Sequence: Synthetic peptide
GSSVSFLSMA

SEQ ID NO: 2030 - protein, 10 aa, synthetic construct
  REGION 1..10: note = Description of Artificial Sequence: Synthetic peptide
GSSVSFLSMA

SEQ ID NO: 2031 - protein, 10 aa, synthetic construct
  REGION 1..10: note = Description of Artificial Sequence: Synthetic peptide
GTSVSFLSMA

SEQ ID NO: 2032 - protein, 10 aa, synthetic construct
  REGION 1..10: note = Description of Artificial Sequence: Synthetic peptide
GSSVKFLSMA

SEQ ID NO: 2033 - protein, 10 aa, synthetic construct
  REGION 1..10: note = Description of Artificial Sequence: Synthetic peptide
GSSVSFLSMA

SEQ ID NO: 2034 - protein, 10 aa, synthetic construct
  REGION 1..10: note = Description of Artificial Sequence: Synthetic peptide
GSRVSFLSMA

SEQ ID NO: 2035 - protein, 10 aa, synthetic construct
  REGION 1..10: note = Description of Artificial Sequence: Synthetic peptide
GSSVSVLSMA

SEQ ID NO: 2036 - protein, 10 aa, synthetic construct
  REGION 1..10: note = Description of Artificial Sequence: Synthetic peptide
GSSVSFLSMA

SEQ ID NO: 2037 - protein, 10 aa, synthetic construct
  REGION 1..10: note = Description of Artificial Sequence: Synthetic peptide
GSRVSFLSMA

SEQ ID NO: 2038 - protein, 10 aa, synthetic construct
  REGION 1..10: note = Description of Artificial Sequence: Synthetic peptide
GSSVKFLSMA

SEQ ID NO: 2039 - protein, 10 aa, synthetic construct
  REGION 1..10: note = Description of Artificial Sequence: Synthetic peptide
GSSVRFLSMA

SEQ ID NO: 2040 - protein, 10 aa, synthetic construct
  REGION 1..10: note = Description of Artificial Sequence: Synthetic peptide
GSSVSQLSMA

SEQ ID NO: 2041 - protein, 10 aa, synthetic construct
  REGION 1..10: note = Description of Artificial Sequence: Synthetic peptide
GSRVSFLSMA

SEQ ID NO: 2042 - protein, 10 aa, synthetic construct
  REGION 1..10: note = Description of Artificial Sequence: Synthetic peptide
KSSVSFLSMA

SEQ ID NO: 2043 - protein, 10 aa, synthetic construct
  REGION 1..10: note = Description of Artificial Sequence: Synthetic peptide
GSSVSFLSMA

SEQ ID NO: 2044 - protein, 10 aa, synthetic construct
  REGION 1..10: note = Description of Artificial Sequence: Synthetic peptide
GSSVKFLSMA

SEQ ID NO: 2045 - protein, 10 aa, synthetic construct
  REGION 1..10: note = Description of Artificial Sequence: Synthetic peptide
GSSVRFLSMA

SEQ ID NO: 2046 - protein, 10 aa, synthetic construct
  REGION 1..10: note = Description of Artificial Sequence: Synthetic peptide
GSSVRFLSMA

SEQ ID NO: 2047 - protein, 10 aa, synthetic construct
  REGION 1..10: note = Description of Artificial Sequence: Synthetic peptide
GSRVSFLSMA

SEQ ID NO: 2048 - protein, 10 aa, synthetic construct
  REGION 1..10: note = Description of Artificial Sequence: Synthetic peptide
GSSVSFLSLA

SEQ ID NO: 2049 - protein, 10 aa, synthetic construct
  REGION 1..10: note = Description of Artificial Sequence: Synthetic peptide
GSSVRFLSMA

SEQ ID NO: 2050 - protein, 10 aa, synthetic construct
  REGION 1..10: note = Description of Artificial Sequence: Synthetic peptide
GSKVSFLSMA

SEQ ID NO: 2051 - protein, 10 aa, synthetic construct
  REGION 1..10: note = Description of Artificial Sequence: Synthetic peptide
GSSVSFLSMA

SEQ ID NO: 2052 - protein, 10 aa, synthetic construct
  REGION 1..10: note = Description of Artificial Sequence: Synthetic peptide
GSSVRFLSMA

SEQ ID NO: 2053 - protein, 10 aa, synthetic construct
  REGION 1..10: note = Description of Artificial Sequence: Synthetic peptide
GSKVSFLSMA

SEQ ID NO: 2054 - protein, 10 aa, synthetic construct
  REGION 1..10: note = Description of Artificial Sequence: Synthetic peptide
GSSVKFLSMA

SEQ ID NO: 2055 - protein, 10 aa, synthetic construct
  REGION 1..10: note = Description of Artificial Sequence: Synthetic peptide
GSSVKFLSMA

SEQ ID NO: 2056 - protein, 10 aa, synthetic construct
  REGION 1..10: note = Description of Artificial Sequence: Synthetic peptide
GSRVSFLSMA

SEQ ID NO: 2057 - protein, 10 aa, synthetic construct
  REGION 1..10: note = Description of Artificial Sequence: Synthetic peptide
GSSVLFLSMA

SEQ ID NO: 2058 - protein, 10 aa, synthetic construct
  REGION 1..10: note = Description of Artificial Sequence: Synthetic peptide
GSRVSFLSMA

SEQ ID NO: 2059 - protein, 10 aa, synthetic construct
  REGION 1..10: note = Description of Artificial Sequence: Synthetic peptide
GSRVSFLSMA

SEQ ID NO: 2060 - protein, 10 aa, synthetic construct
  REGION 1..10: note = Description of Artificial Sequence: Synthetic peptide
GSSVGFLSMA

SEQ ID NO: 2061 - protein, 10 aa, synthetic construct
  REGION 1..10: note = Description of Artificial Sequence: Synthetic peptide
GSSVSFMSMA

SEQ ID NO: 2062 - protein, 10 aa, synthetic construct
  REGION 1..10: note = Description of Artificial Sequence: Synthetic peptide
GSSVSFLSMA

SEQ ID NO: 2063 - protein, 10 aa, synthetic construct
  REGION 1..10: note = Description of Artificial Sequence: Synthetic peptide
GSSVTFLSMA

SEQ ID NO: 2064 - protein, 10 aa, synthetic construct
  REGION 1..10: note = Description of Artificial Sequence: Synthetic peptide
GSSVRFLSMA

SEQ ID NO: 2065 - protein, 10 aa, synthetic construct
  REGION 1..10: note = Description of Artificial Sequence: Synthetic peptide
GSKVSFLSMA

SEQ ID NO: 2066 - protein, 10 aa, synthetic construct
  REGION 1..10: note = Description of Artificial Sequence: Synthetic peptide
GSKVSFMSMA

SEQ ID NO: 2067 - protein, 10 aa, synthetic construct
  REGION 1..10: note = Description of Artificial Sequence: Synthetic peptide
GSSVSNLSMA

SEQ ID NO: 2068 - protein, 10 aa, synthetic construct
  REGION 1..10: note = Description of Artificial Sequence: Synthetic peptide
NSSVSKLSMA

SEQ ID NO: 2069 - protein, 10 aa, synthetic construct
  REGION 1..10: note = Description of Artificial Sequence: Synthetic peptide
GSKVSFLSMA

SEQ ID NO: 2070 - protein, 10 aa, synthetic construct
  REGION 1..10: note = Description of Artificial Sequence: Synthetic peptide
GSQVSFLSMA

SEQ ID NO: 2071 - protein, 10 aa, synthetic construct
  REGION 1..10: note = Description of Artificial Sequence: Synthetic peptide
GSKVSFMSMA

SEQ ID NO: 2072 - protein, 10 aa, synthetic construct
  REGION 1..10: note = Description of Artificial Sequence: Synthetic peptide
GSRVSFLSMA

SEQ ID NO: 2073 - protein, 10 aa, synthetic construct
  REGION 1..10: note = Description of Artificial Sequence: Synthetic peptide
GSSVRFLSMA

SEQ ID NO: 2074 - protein, 10 aa, synthetic construct
  REGION 1..10: note = Description of Artificial Sequence: Synthetic peptide
GSKVSFLSMA

SEQ ID NO: 2075 - protein, 10 aa, synthetic construct
  REGION 1..10: note = Description of Artificial Sequence: Synthetic peptide
GSSVRFLSMA

SEQ ID NO: 2076 - protein, 10 aa, synthetic construct
  REGION 1..10: note = Description of Artificial Sequence: Synthetic peptide
GSSVSFLSIA

SEQ ID NO: 2077 - protein, 10 aa, synthetic construct
  REGION 1..10: note = Description of Artificial Sequence: Synthetic peptide
GSSSSFLSMA

SEQ ID NO: 2078 - protein, 10 aa, synthetic construct
  REGION 1..10: note = Description of Artificial Sequence: Synthetic peptide
GSSVKFLSMA

SEQ ID NO: 2079 - protein, 10 aa, synthetic construct
  REGION 1..10: note = Description of Artificial Sequence: Synthetic peptide
GSSVNFLSMA

SEQ ID NO: 2080 - protein, 10 aa, synthetic construct
  REGION 1..10: note = Description of Artificial Sequence: Synthetic peptide
GSSVKFLSMA

SEQ ID NO: 2081 - protein, 10 aa, synthetic construct
  REGION 1..10: note = Description of Artificial Sequence: Synthetic peptide
GSSVSFLSMA

SEQ ID NO: 2082 - protein, 10 aa, synthetic construct
  REGION 1..10: note = Description of Artificial Sequence: Synthetic peptide
GSSVRFLSMA

SEQ ID NO: 2083 - protein, 10 aa, synthetic construct
  REGION 1..10: note = Description of Artificial Sequence: Synthetic peptide
GSSVSFLSVA

SEQ ID NO: 2084 - protein, 10 aa, synthetic construct
  REGION 1..10: note = Description of Artificial Sequence: Synthetic peptide
GSQVSFLSMA

SEQ ID NO: 2085 - protein, 10 aa, synthetic construct
  REGION 1..10: note = Description of Artificial Sequence: Synthetic peptide
GTSVSFLSMA

SEQ ID NO: 2086 - protein, 10 aa, synthetic construct
  REGION 1..10: note = Description of Artificial Sequence: Synthetic peptide
GSRVSFLSMA

SEQ ID NO: 2087 - protein, 10 aa, synthetic construct
  REGION 1..10: note = Description of Artificial Sequence: Synthetic peptide
GSSVKFLSMA

SEQ ID NO: 2088 - protein, 10 aa, synthetic construct
  REGION 1..10: note = Description of Artificial Sequence: Synthetic peptide
GSSVSFLSSA

SEQ ID NO: 2089 - protein, 10 aa, synthetic construct
  REGION 1..10: note = Description of Artificial Sequence: Synthetic peptide
GSSVKFLSMA

SEQ ID NO: 2090 - protein, 10 aa, synthetic construct
  REGION 1..10: note = Description of Artificial Sequence: Synthetic peptide
GSSVSFLSMA

SEQ ID NO: 2091 - protein, 10 aa, synthetic construct
  REGION 1..10: note = Description of Artificial Sequence: Synthetic peptide
GSTVSFLSMA

SEQ ID NO: 2092 - protein, 10 aa, synthetic construct
  REGION 1..10: note = Description of Artificial Sequence: Synthetic peptide
GSSVQFLSMA

SEQ ID NO: 2093 - protein, 10 aa, synthetic construct
  REGION 1..10: note = Description of Artificial Sequence: Synthetic peptide
RSSVSFLSMA

SEQ ID NO: 2094 - protein, 10 aa, synthetic construct
  REGION 1..10: note = Description of Artificial Sequence: Synthetic peptide
GSKVSFLSMA

SEQ ID NO: 2095 - protein, 10 aa, synthetic construct
  REGION 1..10: note = Description of Artificial Sequence: Synthetic peptide
GSRVSFLSMA

SEQ ID NO: 2096 - protein, 10 aa, synthetic construct
  REGION 1..10: note = Description of Artificial Sequence: Synthetic peptide
GSSVSFLSMA

SEQ ID NO: 2097 - protein, 10 aa, synthetic construct
  REGION 1..10: note = Description of Artificial Sequence: Synthetic peptide
GSKVSFLSMA

SEQ ID NO: 2098 - protein, 10 aa, synthetic construct
  REGION 1..10: note = Description of Artificial Sequence: Synthetic peptide
GSSVRFLSMA

SEQ ID NO: 2099 - protein, 10 aa, synthetic construct
  REGION 1..10: note = Description of Artificial Sequence: Synthetic peptide
GSSVKFLSMA

SEQ ID NO: 2100 - protein, 10 aa, synthetic construct
  REGION 1..10: note = Description of Artificial Sequence: Synthetic peptide
GSSVKFLSMA

SEQ ID NO: 2101 - protein, 10 aa, synthetic construct
  REGION 1..10: note = Description of Artificial Sequence: Synthetic peptide
GSSVSILSMA

SEQ ID NO: 2102 - protein, 10 aa, synthetic construct
  REGION 1..10: note = Description of Artificial Sequence: Synthetic peptide
GSSVSFLSVA

SEQ ID NO: 2103 - protein, 10 aa, synthetic construct
  REGION 1..10: note = Description of Artificial Sequence: Synthetic peptide
GSSVRFLSMA

SEQ ID NO: 2104 - protein, 10 aa, synthetic construct
  REGION 1..10: note = Description of Artificial Sequence: Synthetic peptide
GSRVSFLSMA

SEQ ID NO: 2105 - protein, 10 aa, synthetic construct
  REGION 1..10: note = Description of Artificial Sequence: Synthetic peptide
GHSVSFLSMA

SEQ ID NO: 2106 - protein, 10 aa, synthetic construct
  REGION 1..10: note = Description of Artificial Sequence: Synthetic peptide
GSSVRFLSMA

SEQ ID NO: 2107 - protein, 10 aa, synthetic construct
  REGION 1..10: note = Description of Artificial Sequence: Synthetic peptide
GSSVSFLSMA

SEQ ID NO: 2108 - protein, 10 aa, synthetic construct
  REGION 1..10: note = Description of Artificial Sequence: Synthetic peptide
GSRVSFLSMA

SEQ ID NO: 2109 - protein, 10 aa, synthetic construct
  REGION 1..10: note = Description of Artificial Sequence: Synthetic peptide
GSSVKFLSMA

SEQ ID NO: 2110 - protein, 10 aa, synthetic construct
  REGION 1..10: note = Description of Artificial Sequence: Synthetic peptide
GSSVSRLSMA

SEQ ID NO: 2111 - protein, 10 aa, synthetic construct
  REGION 1..10: note = Description of Artificial Sequence: Synthetic peptide
GRSVSFLSMA

SEQ ID NO: 2112 - protein, 10 aa, synthetic construct
  REGION 1..10: note = Description of Artificial Sequence: Synthetic peptide
GRSVSFLSMA

SEQ ID NO: 2113 - protein, 10 aa, synthetic construct
  REGION 1..10: note = Description of Artificial Sequence: Synthetic peptide
GSSVKFLSMA

SEQ ID NO: 2114 - protein, 10 aa, synthetic construct
  REGION 1..10: note = Description of Artificial Sequence: Synthetic peptide
GSSVSKLSMA

SEQ ID NO: 2115 - protein, 10 aa, synthetic construct
  REGION 1..10: note = Description of Artificial Sequence: Synthetic peptide
GSSVSRLSMA

SEQ ID NO: 2116 - protein, 10 aa, synthetic construct
  REGION 1..10: note = Description of Artificial Sequence: Synthetic peptide
GSSVKFLSLA

SEQ ID NO: 2117 - protein, 10 aa, synthetic construct
  REGION 1..10: note = Description of Artificial Sequence: Synthetic peptide
GSSVSRLSLA

SEQ ID NO: 2118 - protein, 10 aa, synthetic construct
  REGION 1..10: note = Description of Artificial Sequence: Synthetic peptide
GTSSSINAMG

SEQ ID NO: 2119 - protein, 10 aa, synthetic construct
  REGION 1..10: note = Description of Artificial Sequence: Synthetic peptide
GTTSSINAIG

SEQ ID NO: 2120 - protein, 10 aa, synthetic construct
  REGION 1..10: note = Description of Artificial Sequence: Synthetic peptide
GSTSSINAMA

SEQ ID NO: 2121 - protein, 10 aa, synthetic construct
  REGION 1..10: note = Description of Artificial Sequence: Synthetic peptide
GQTYRVNAFG

SEQ ID NO: 2122 - protein, 10 aa, synthetic construct
  REGION 1..10: note = Description of Artificial Sequence: Synthetic peptide
GSTSSINAMA

SEQ ID NO: 2123 - protein, 10 aa, synthetic construct
  REGION 1..10: note = Description of Artificial Sequence: Synthetic peptide
GSASLTNATG

SEQ ID NO: 2124 - protein, 10 aa, synthetic construct
  REGION 1..10: note = Description of Artificial Sequence: Synthetic peptide
GYPSLNNAMG

SEQ ID NO: 2125 - protein, 10 aa, synthetic construct
  REGION 1..10: note = Description of Artificial Sequence: Synthetic peptide
GSSSTINAIG

SEQ ID NO: 2126 - protein, 10 aa, synthetic construct
  REGION 1..10: note = Description of Artificial Sequence: Synthetic peptide
GSTSYINAMG

SEQ ID NO: 2127 - protein, 10 aa, synthetic construct
  REGION 1..10: note = Description of Artificial Sequence: Synthetic peptide
GSTSSVNALG

SEQ ID NO: 2128 - protein, 10 aa, synthetic construct
  REGION 1..10: note = Description of Artificial Sequence: Synthetic peptide
GSTSLSNAVG

SEQ ID NO: 2129 - protein, 10 aa, synthetic construct
  REGION 1..10: note = Description of Artificial Sequence: Synthetic peptide
GSTSSTNAIG

SEQ ID NO: 2130 - protein, 10 aa, synthetic construct
  REGION 1..10: note = Description of Artificial Sequence: Synthetic peptide
GLTSTINAMG

SEQ ID NO: 2131 - protein, 10 aa, synthetic construct
  REGION 1..10: note = Description of Artificial Sequence: Synthetic peptide
GVSPSKNAIG

SEQ ID NO: 2132 - protein, 10 aa, synthetic construct
  REGION 1..10: note = Description of Artificial Sequence: Synthetic peptide
GSTSSINAVG

SEQ ID NO: 2133 - protein, 10 aa, synthetic construct
  REGION 1..10: note = Description of Artificial Sequence: Synthetic peptide
GSTTMNNAMA

SEQ ID NO: 2134 - protein, 10 aa, synthetic construct
  REGION 1..10: note = Description of Artificial Sequence: Synthetic peptide
GSTSKINAIG

SEQ ID NO: 2135 - protein, 10 aa, synthetic construct
  REGION 1..10: note = Description of Artificial Sequence: Synthetic peptide
GQTTALNAMG

SEQ ID NO: 2136 - protein, 10 aa, synthetic construct
  REGION 1..10: note = Description of Artificial Sequence: Synthetic peptide
GATSSINAIG

SEQ ID NO: 2137 - protein, 10 aa, synthetic construct
  REGION 1..10: note = Description of Artificial Sequence: Synthetic peptide
GSTSTINAMG

SEQ ID NO: 2138 - protein, 10 aa, synthetic construct
  REGION 1..10: note = Description of Artificial Sequence: Synthetic peptide
GSTSSINAMG

SEQ ID NO: 2139 - protein, 10 aa, synthetic construct
  REGION 1..10: note = Description of Artificial Sequence: Synthetic peptide
GSTSLVNAMG

SEQ ID NO: 2140 - protein, 10 aa, synthetic construct
  REGION 1..10: note = Description of Artificial Sequence: Synthetic peptide
GSTSLNNAIG

SEQ ID NO: 2141 - protein, 10 aa, synthetic construct
  REGION 1..10: note = Description of Artificial Sequence: Synthetic peptide
GSTSPVNAMA

SEQ ID NO: 2142 - protein, 10 aa, synthetic construct
  REGION 1..10: note = Description of Artificial Sequence: Synthetic peptide
GTTSSMNAIG

SEQ ID NO: 2143 - protein, 10 aa, synthetic construct
  REGION 1..10: note = Description of Artificial Sequence: Synthetic peptide
GETSSINAMA

SEQ ID NO: 2144 - protein, 10 aa, synthetic construct
  REGION 1..10: note = Description of Artificial Sequence: Synthetic peptide
GSTSTINAIG

SEQ ID NO: 2145 - protein, 10 aa, synthetic construct
  REGION 1..10: note = Description of Artificial Sequence: Synthetic peptide
GSTYSMNAMG

SEQ ID NO: 2146 - protein, 10 aa, synthetic construct
  REGION 1..10: note = Description of Artificial Sequence: Synthetic peptide
GSPSSINAYG

SEQ ID NO: 2147 - protein, 10 aa, synthetic construct
  REGION 1..10: note = Description of Artificial Sequence: Synthetic peptide
GSTSTINAIG

SEQ ID NO: 2148 - protein, 10 aa, synthetic construct
  REGION 1..10: note = Description of Artificial Sequence: Synthetic peptide
GSTSSINAIG

SEQ ID NO: 2149 - protein, 10 aa, synthetic construct
  REGION 1..10: note = Description of Artificial Sequence: Synthetic peptide
GSISSINAMG

SEQ ID NO: 2150 - protein, 10 aa, synthetic construct
  REGION 1..10: note = Description of Artificial Sequence: Synthetic peptide
GSTQVNNAMA

SEQ ID NO: 2151 - protein, 10 aa, synthetic construct
  REGION 1..10: note = Description of Artificial Sequence: Synthetic peptide
GSTASFNAMA

SEQ ID NO: 2152 - protein, 10 aa, synthetic construct
  REGION 1..10: note = Description of Artificial Sequence: Synthetic peptide
GSPLSINAIG

SEQ ID NO: 2153 - protein, 10 aa, synthetic construct
  REGION 1..10: note = Description of Artificial Sequence: Synthetic peptide
GSTTFINAIG

SEQ ID NO: 2154 - protein, 10 aa, synthetic construct
  REGION 1..10: note = Description of Artificial Sequence: Synthetic peptide
GSTSSINAIG

SEQ ID NO: 2155 - protein, 10 aa, synthetic construct
  REGION 1..10: note = Description of Artificial Sequence: Synthetic peptide
GETDTINAVG

SEQ ID NO: 2156 - protein, 10 aa, synthetic construct
  REGION 1..10: note = Description of Artificial Sequence: Synthetic peptide
GSTSPINAIG

SEQ ID NO: 2157 - protein, 10 aa, synthetic construct
  REGION 1..10: note = Description of Artificial Sequence: Synthetic peptide
GSITSSNAMG

SEQ ID NO: 2158 - protein, 10 aa, synthetic construct
  REGION 1..10: note = Description of Artificial Sequence: Synthetic peptide
RYSVSNLSMA

SEQ ID NO: 2159 - protein, 10 aa, synthetic construct
  REGION 1..10: note = Description of Artificial Sequence: Synthetic peptide
MSTVSVLSMA

SEQ ID NO: 2160 - protein, 10 aa, synthetic construct
  REGION 1..10: note = Description of Artificial Sequence: Synthetic peptide
DSYVSLLSMA

SEQ ID NO: 2161 - protein, 10 aa, synthetic construct
  REGION 1..10: note = Description of Artificial Sequence: Synthetic peptide
DSAVSVLSIA

SEQ ID NO: 2162 - protein, 10 aa, synthetic construct
  REGION 1..10: note = Description of Artificial Sequence: Synthetic peptide
HSSVTSLSLA

SEQ ID NO: 2163 - protein, 10 aa, synthetic construct
  REGION 1..10: note = Description of Artificial Sequence: Synthetic peptide
DSVVKFLSMA

SEQ ID NO: 2164 - protein, 10 aa, synthetic construct
  REGION 1..10: note = Description of Artificial Sequence: Synthetic peptide
DPSVWNLSMA

SEQ ID NO: 2165 - protein, 10 aa, synthetic construct
  REGION 1..10: note = Description of Artificial Sequence: Synthetic peptide
GTSVMLLSLA

SEQ ID NO: 2166 - protein, 10 aa, synthetic construct
  REGION 1..10: note = Description of Artificial Sequence: Synthetic peptide
SSPVSNLSLA

SEQ ID NO: 2167 - protein, 10 aa, synthetic construct
  REGION 1..10: note = Description of Artificial Sequence: Synthetic peptide
WRSVLLLSVA

SEQ ID NO: 2168 - protein, 10 aa, synthetic construct
  REGION 1..10: note = Description of Artificial Sequence: Synthetic peptide
SSSVQYLSMA

SEQ ID NO: 2169 - protein, 10 aa, synthetic construct
  REGION 1..10: note = Description of Artificial Sequence: Synthetic peptide
GTSVSLLSLA

SEQ ID NO: 2170 - protein, 10 aa, synthetic construct
  REGION 1..10: note = Description of Artificial Sequence: Synthetic peptide
LSSVSNLSIA

SEQ ID NO: 2171 - protein, 10 aa, synthetic construct
  REGION 1..10: note = Description of Artificial Sequence: Synthetic peptide
MYSVSFLSMA

SEQ ID NO: 2172 - protein, 10 aa, synthetic construct
  REGION 1..10: note = Description of Artificial Sequence: Synthetic peptide
KSSVSHLSLA

SEQ ID NO: 2173 - protein, 10 aa, synthetic construct
  REGION 1..10: note = Description of Artificial Sequence: Synthetic peptide
YTSVLDLSIA

SEQ ID NO: 2174 - protein, 10 aa, synthetic construct
  REGION 1..10: note = Description of Artificial Sequence: Synthetic peptide
MSDVSFLSMA

SEQ ID NO: 2175 - protein, 10 aa, synthetic construct
  REGION 1..10: note = Description of Artificial Sequence: Synthetic peptide
ESSVSFLSSA

SEQ ID NO: 2176 - protein, 10 aa, synthetic construct
  REGION 1..10: note = Description of Artificial Sequence: Synthetic peptide
GDSVSLLSMA

SEQ ID NO: 2177 - protein, 10 aa, synthetic construct
  REGION 1..10: note = Description of Artificial Sequence: Synthetic peptide
GSDVWYLSLA

SEQ ID NO: 2178 - protein, 10 aa, synthetic construct
  REGION 1..10: note = Description of Artificial Sequence: Synthetic peptide
KSAVAFLSIA

SEQ ID NO: 2179 - protein, 10 aa, synthetic construct
  REGION 1..10: note = Description of Artificial Sequence: Synthetic peptide
FSAVAYLSMA

SEQ ID NO: 2180 - protein, 10 aa, synthetic construct
  REGION 1..10: note = Description of Artificial Sequence: Synthetic peptide
VYSVYDLSTA

SEQ ID NO: 2181 - protein, 10 aa, synthetic construct
  REGION 1..10: note = Description of Artificial Sequence: Synthetic peptide
GDSVSFLSMA

SEQ ID NO: 2182 - protein, 10 aa, synthetic construct
  REGION 1..10: note = Description of Artificial Sequence: Synthetic peptide
SSSVSLLSLA

SEQ ID NO: 2183 - protein, 10 aa, synthetic construct
  REGION 1..10: note = Description of Artificial Sequence: Synthetic peptide
ADSVSFLSIA

SEQ ID NO: 2184 - protein, 10 aa, synthetic construct
  REGION 1..10: note = Description of Artificial Sequence: Synthetic peptide
ASSVTLLSIA

SEQ ID NO: 2185 - protein, 10 aa, synthetic construct
  REGION 1..10: note = Description of Artificial Sequence: Synthetic peptide
ADSVSFLSIA

SEQ ID NO: 2186 - protein, 10 aa, synthetic construct
  REGION 1..10: note = Description of Artificial Sequence: Synthetic peptide
GTSVWLLSMA

SEQ ID NO: 2187 - protein, 10 aa, synthetic construct
  REGION 1..10: note = Description of Artificial Sequence: Synthetic peptide
GSSVSILSIA

SEQ ID NO: 2188 - protein, 10 aa, synthetic construct
  REGION 1..10: note = Description of Artificial Sequence: Synthetic peptide
GTAVSNLSIA

SEQ ID NO: 2189 - protein, 10 aa, synthetic construct
  REGION 1..10: note = Description of Artificial Sequence: Synthetic peptide
GSAVSMLSLA

SEQ ID NO: 2190 - protein, 10 aa, synthetic construct
  REGION 1..10: note = Description of Artificial Sequence: Synthetic peptide
GMTVFFLSMA

SEQ ID NO: 2191 - protein, 10 aa, synthetic construct
  REGION 1..10: note = Description of Artificial Sequence: Synthetic peptide
QYSVTFLSVA

SEQ ID NO: 2192 - protein, 10 aa, synthetic construct
  REGION 1..10: note = Description of Artificial Sequence: Synthetic peptide
GETVSFLSLA

SEQ ID NO: 2193 - protein, 10 aa, synthetic construct
  REGION 1..10: note = Description of Artificial Sequence: Synthetic peptide
LSSVSVLSIA

SEQ ID NO: 2194 - protein, 16 aa, synthetic construct
  REGION 1..16: note = Description of Artificial Sequence: Synthetic peptide
VITSFSSTNYADSVKG

SEQ ID NO: 2195 - protein, 16 aa, synthetic construct
  REGION 1..16: note = Description of Artificial Sequence: Synthetic peptide
VITSFSSTNYADSVKG

SEQ ID NO: 2196 - protein, 16 aa, synthetic construct
  REGION 1..16: note = Description of Artificial Sequence: Synthetic peptide
AITSFSSTNYADSVKG

SEQ ID NO: 2197 - protein, 16 aa, synthetic construct
  REGION 1..16: note = Description of Artificial Sequence: Synthetic peptide
RITSGGSTNYADSVKG

SEQ ID NO: 2198 - protein, 16 aa, synthetic construct
  REGION 1..16: note = Description of Artificial Sequence: Synthetic peptide
AITSFGSTNYADSVKD

SEQ ID NO: 2199 - protein, 16 aa, synthetic construct
  REGION 1..16: note = Description of Artificial Sequence: Synthetic peptide
AITTFDYTNYADSVKG

SEQ ID NO: 2200 - protein, 16 aa, synthetic construct
  REGION 1..16: note = Description of Artificial Sequence: Synthetic peptide
AITSFGSTNYADSVKG

SEQ ID NO: 2201 - protein, 16 aa, synthetic construct
  REGION 1..16: note = Description of Artificial Sequence: Synthetic peptide
TLTSGGNTNYADSVKG

SEQ ID NO: 2202 - protein, 16 aa, synthetic construct
  REGION 1..16: note = Description of Artificial Sequence: Synthetic peptide
TLTSGGNTNYADSVKG

SEQ ID NO: 2203 - protein, 16 aa, synthetic construct
  REGION 1..16: note = Description of Artificial Sequence: Synthetic peptide
TLTSGGNTNYADSVKG

SEQ ID NO: 2204 - protein, 16 aa, synthetic construct
  REGION 1..16: note = Description of Artificial Sequence: Synthetic peptide
TLTSGGNTNYADSVKG

SEQ ID NO: 2205 - protein, 16 aa, synthetic construct
  REGION 1..16: note = Description of Artificial Sequence: Synthetic peptide
SLTSEGLTNYRDSVKG

SEQ ID NO: 2206 - protein, 16 aa, synthetic construct
  REGION 1..16: note = Description of Artificial Sequence: Synthetic peptide
AITTWGSTNYADSVKG

SEQ ID NO: 2207 - protein, 16 aa, synthetic construct
  REGION 1..16: note = Description of Artificial Sequence: Synthetic peptide
AITSYGSTNYADSVKG

SEQ ID NO: 2208 - protein, 16 aa, synthetic construct
  REGION 1..16: note = Description of Artificial Sequence: Synthetic peptide
AITTYGSTNYIDSVKG

SEQ ID NO: 2209 - protein, 16 aa, synthetic construct
  REGION 1..16: note = Description of Artificial Sequence: Synthetic peptide
RITTFGTTNYADSVKG

SEQ ID NO: 2210 - protein, 17 aa, synthetic construct
  REGION 1..17: note = Description of Artificial Sequence: Synthetic peptide
RITSSGFSTNYADSVKG

SEQ ID NO: 2211 - protein, 17 aa, synthetic construct
  REGION 1..17: note = Description of Artificial Sequence: Synthetic peptide
RITSSGFSTNYADSVKG

SEQ ID NO: 2212 - protein, 16 aa, synthetic construct
  REGION 1..16: note = Description of Artificial Sequence: Synthetic peptide
NMHSGGSTNYADSVKG

SEQ ID NO: 2213 - protein, 16 aa, synthetic construct
  REGION 1..16: note = Description of Artificial Sequence: Synthetic peptide
GISVDGSTNYADSVKG

SEQ ID NO: 2214 - protein, 16 aa, synthetic construct
  REGION 1..16: note = Description of Artificial Sequence: Synthetic peptide
GISVDGSTNYADSVKG

SEQ ID NO: 2215 - protein, 16 aa, synthetic construct
  REGION 1..16: note = Description of Artificial Sequence: Synthetic peptide
GISVDGSTNYADSVKG

SEQ ID NO: 2216 - protein, 16 aa, synthetic construct
  REGION 1..16: note = Description of Artificial Sequence: Synthetic peptide
GISVDGSTNYADSVKG

SEQ ID NO: 2217 - protein, 16 aa, synthetic construct
  REGION 1..16: note = Description of Artificial Sequence: Synthetic peptide
GISVDGSTNYADSVKG

SEQ ID NO: 2218 - protein, 16 aa, synthetic construct
  REGION 1..16: note = Description of Artificial Sequence: Synthetic peptide
GISTDGSTNYVDSVKG

SEQ ID NO: 2219 - protein, 16 aa, synthetic construct
  REGION 1..16: note = Description of Artificial Sequence: Synthetic peptide
GISTDGTTNYVDSVKD

SEQ ID NO: 2220 - protein, 16 aa, synthetic construct
  REGION 1..16: note = Description of Artificial Sequence: Synthetic peptide
GISTDGTTNYVDSVKD

SEQ ID NO: 2221 - protein, 16 aa, synthetic construct
  REGION 1..16: note = Description of Artificial Sequence: Synthetic peptide
GISTDGTTNYVDSVKD

SEQ ID NO: 2222 - protein, 16 aa, synthetic construct
  REGION 1..16: note = Description of Artificial Sequence: Synthetic peptide
GISTDGSTNYADSVKG

SEQ ID NO: 2223 - protein, 16 aa, synthetic construct
  REGION 1..16: note = Description of Artificial Sequence: Synthetic peptide
GISTDGSTNYADSVKG

SEQ ID NO: 2224 - protein, 16 aa, synthetic construct
  REGION 1..16: note = Description of Artificial Sequence: Synthetic peptide
GISTDGSTNYADSVKG

SEQ ID NO: 2225 - protein, 16 aa, synthetic construct
  REGION 1..16: note = Description of Artificial Sequence: Synthetic peptide
GISSDGSTNYVDSVKG

SEQ ID NO: 2226 - protein, 16 aa, synthetic construct
  REGION 1..16: note = Description of Artificial Sequence: Synthetic peptide
GISADGSTDYIDSVKG

SEQ ID NO: 2227 - protein, 16 aa, synthetic construct
  REGION 1..16: note = Description of Artificial Sequence: Synthetic peptide
GISSDGSTHYVDSVKG

SEQ ID NO: 2228 - protein, 16 aa, synthetic construct
  REGION 1..16: note = Description of Artificial Sequence: Synthetic peptide
GISSDGSKNYADSVKG

SEQ ID NO: 2229 - protein, 16 aa, synthetic construct
  REGION 1..16: note = Description of Artificial Sequence: Synthetic peptide
GISSDGSKVYADSVKG

SEQ ID NO: 2230 - protein, 16 aa, synthetic construct
  REGION 1..16: note = Description of Artificial Sequence: Synthetic peptide
GSSSDGSTHYVDSVRG

SEQ ID NO: 2231 - protein, 16 aa, synthetic construct
  REGION 1..16: note = Description of Artificial Sequence: Synthetic peptide
IIRSGGSSNYADTVKG

SEQ ID NO: 2232 - protein, 16 aa, synthetic construct
  REGION 1..16: note = Description of Artificial Sequence: Synthetic peptide
LITSGGSSNYADTVKG

SEQ ID NO: 2233 - protein, 16 aa, synthetic construct
  REGION 1..16: note = Description of Artificial Sequence: Synthetic peptide
IITSGGSSNYADTVKG

SEQ ID NO: 2234 - protein, 16 aa, synthetic construct
  REGION 1..16: note = Description of Artificial Sequence: Synthetic peptide
TIFDGSYTNYADSVKG

SEQ ID NO: 2235 - protein, 16 aa, synthetic construct
  REGION 1..16: note = Description of Artificial Sequence: Synthetic peptide
SITTFGSTNYADPVKG

SEQ ID NO: 2236 - protein, 16 aa, synthetic construct
  REGION 1..16: note = Description of Artificial Sequence: Synthetic peptide
TITRDGTRNYADSLKG

SEQ ID NO: 2237 - protein, 16 aa, synthetic construct
  REGION 1..16: note = Description of Artificial Sequence: Synthetic peptide
TISRGGTRTYADSVKG

SEQ ID NO: 2238 - protein, 16 aa, synthetic construct
  REGION 1..16: note = Description of Artificial Sequence: Synthetic peptide
LIGSAGSTKYADSVKG

SEQ ID NO: 2239 - protein, 16 aa, synthetic construct
  REGION 1..16: note = Description of Artificial Sequence: Synthetic peptide
RITSGGITKYADSVKG

SEQ ID NO: 2240 - protein, 16 aa, synthetic construct
  REGION 1..16: note = Description of Artificial Sequence: Synthetic peptide
RITSGGITKYADSVKG

SEQ ID NO: 2241 - protein, 16 aa, synthetic construct
  REGION 1..16: note = Description of Artificial Sequence: Synthetic peptide
RITSGGITKYADSVKG

SEQ ID NO: 2242 - protein, 16 aa, synthetic construct
  REGION 1..16: note = Description of Artificial Sequence: Synthetic peptide
RITSGGITKYADSVKG

SEQ ID NO: 2243 - protein, 16 aa, synthetic construct
  REGION 1..16: note = Description of Artificial Sequence: Synthetic peptide
AITTSGNTSYADSVKG

SEQ ID NO: 2244 - protein, 16 aa, synthetic construct
  REGION 1..16: note = Description of Artificial Sequence: Synthetic peptide
VITRGGATNYADSVKG

SEQ ID NO: 2245 - protein, 16 aa, synthetic construct
  REGION 1..16: note = Description of Artificial Sequence: Synthetic peptide
SIAGDGRTNYAESTEG

SEQ ID NO: 2246 - protein, 16 aa, synthetic construct
  REGION 1..16: note = Description of Artificial Sequence: Synthetic peptide
VITSFSSTNYADSVKG

SEQ ID NO: 2247 - protein, 16 aa, synthetic construct
  REGION 1..16: note = Description of Artificial Sequence: Synthetic peptide
IIRSGGSSNYADTVKG

SEQ ID NO: 2248 - protein, 16 aa, synthetic construct
  REGION 1..16: note = Description of Artificial Sequence: Synthetic peptide
GISVDGSTNYADSVKG

SEQ ID NO: 2249 - protein, 16 aa, synthetic construct
  REGION 1..16: note = Description of Artificial Sequence: Synthetic peptide
AITTSGNTSYADSVKG

SEQ ID NO: 2250 - protein, 16 aa, synthetic construct
  REGION 1..16: note = Description of Artificial Sequence: Synthetic peptide
TLTSGGNTNYADSVKG

SEQ ID NO: 2251 - protein, 16 aa, synthetic construct
  REGION 1..16: note = Description of Artificial Sequence: Synthetic peptide
TLTSGGNTNYADSVKG

SEQ ID NO: 2252 - protein, 16 aa, synthetic construct
  REGION 1..16: note = Description of Artificial Sequence: Synthetic peptide
AITTFDYTNYADSVKG

SEQ ID NO: 2253 - protein, 16 aa, synthetic construct
  REGION 1..16: note = Description of Artificial Sequence: Synthetic peptide
GISSDGSKNYADSVKG

SEQ ID NO: 2254 - protein, 16 aa, synthetic construct
  REGION 1..16: note = Description of Artificial Sequence: Synthetic peptide
AITSYGSTNYADSVKG

SEQ ID NO: 2255 - protein, 16 aa, synthetic construct
  REGION 1..16: note = Description of Artificial Sequence: Synthetic peptide
IITSGGSSNYADTVKG

SEQ ID NO: 2256 - protein, 17 aa, synthetic construct
  REGION 1..17: note = Description of Artificial Sequence: Synthetic peptide
RITSSGFSTNYADSVKG

SEQ ID NO: 2257 - protein, 16 aa, synthetic construct
  REGION 1..16: note = Description of Artificial Sequence: Synthetic peptide
VITRGGATNYADSVKG

SEQ ID NO: 2258 - protein, 16 aa, synthetic construct
  REGION 1..16: note = Description of Artificial Sequence: Synthetic peptide
RITSGGSTNYADSVKG

SEQ ID NO: 2259 - protein, 16 aa, synthetic construct
  REGION 1..16: note = Description of Artificial Sequence: Synthetic peptide
RITSGGITKYADSVKG

SEQ ID NO: 2260 - protein, 16 aa, synthetic construct
  REGION 1..16: note = Description of Artificial Sequence: Synthetic peptide
TIFDGSYTNYADSVKG

SEQ ID NO: 2261 - protein, 16 aa, synthetic construct
  REGION 1..16: note = Description of Artificial Sequence: Synthetic peptide
GISSDGSKVYADSVKG

SEQ ID NO: 2262 - protein, 16 aa, synthetic construct
  REGION 1..16: note = Description of Artificial Sequence: Synthetic peptide
SITTFGSTNYADPVKG

SEQ ID NO: 2263 - protein, 16 aa, synthetic construct
  REGION 1..16: note = Description of Artificial Sequence: Synthetic peptide
AITTWGSTNYADSVKG

SEQ ID NO: 2264 - protein, 17 aa, synthetic construct
  REGION 1..17: note = Description of Artificial Sequence: Synthetic peptide
RITSSGFSTNYADSVKG

SEQ ID NO: 2265 - protein, 16 aa, synthetic construct
  REGION 1..16: note = Description of Artificial Sequence: Synthetic peptide
NMHSGGSTNYADSVKG

SEQ ID NO: 2266 - protein, 16 aa, synthetic construct
  REGION 1..16: note = Description of Artificial Sequence: Synthetic peptide
GISTDGSTNYVDSVKG

SEQ ID NO: 2267 - protein, 16 aa, synthetic construct
  REGION 1..16: note = Description of Artificial Sequence: Synthetic peptide
TITRDGTRNYADSLKG

SEQ ID NO: 2268 - protein, 16 aa, synthetic construct
  REGION 1..16: note = Description of Artificial Sequence: Synthetic peptide
GISADGSTDYIDSVKG

SEQ ID NO: 2269 - protein, 16 aa, synthetic construct
  REGION 1..16: note = Description of Artificial Sequence: Synthetic peptide
SIAGDGRTNYAESTEG

SEQ ID NO: 2270 - protein, 16 aa, synthetic construct
  REGION 1..16: note = Description of Artificial Sequence: Synthetic peptide
GISVDGSTNYADSVKG

SEQ ID NO: 2271 - protein, 16 aa, synthetic construct
  REGION 1..16: note = Description of Artificial Sequence: Synthetic peptide
RITTFGTTNYADSVKG

SEQ ID NO: 2272 - protein, 16 aa, synthetic construct
  REGION 1..16: note = Description of Artificial Sequence: Synthetic peptide
TISRGGTRTYADSVKG

SEQ ID NO: 2273 - protein, 16 aa, synthetic construct
  REGION 1..16: note = Description of Artificial Sequence: Synthetic peptide
AITSFGSTNYADSVKD

SEQ ID NO: 2274 - protein, 16 aa, synthetic construct
  REGION 1..16: note = Description of Artificial Sequence: Synthetic peptide
LITSGGSSNYADTVKG

SEQ ID NO: 2275 - protein, 16 aa, synthetic construct
  REGION 1..16: note = Description of Artificial Sequence: Synthetic peptide
SLTSEGLTNYRDSVKG

SEQ ID NO: 2276 - protein, 16 aa, synthetic construct
  REGION 1..16: note = Description of Artificial Sequence: Synthetic peptide
GISSDGSTHYVDSVKG

SEQ ID NO: 2277 - protein, 16 aa, synthetic construct
  REGION 1..16: note = Description of Artificial Sequence: Synthetic peptide
LIGSAGSTKYADSVKG

SEQ ID NO: 2278 - protein, 16 aa, synthetic construct
  REGION 1..16: note = Description of Artificial Sequence: Synthetic peptide
GSSSDGSTHYVDSVRG

SEQ ID NO: 2279 - protein, 16 aa, synthetic construct
  REGION 1..16: note = Description of Artificial Sequence: Synthetic peptide
AITSFGSTNYADSVKG

SEQ ID NO: 2280 - protein, 16 aa, synthetic construct
  REGION 1..16: note = Description of Artificial Sequence: Synthetic peptide
GISSDGSFVYADSVKG

SEQ ID NO: 2281 - protein, 16 aa, synthetic construct
  REGION 1..16: note = Description of Artificial Sequence: Synthetic peptide
GISSDGSKVYADSVKG

SEQ ID NO: 2282 - protein, 16 aa, synthetic construct
  REGION 1..16: note = Description of Artificial Sequence: Synthetic peptide
GISSDGSKVYEDSVKG

SEQ ID NO: 2283 - protein, 16 aa, synthetic construct
  REGION 1..16: note = Description of Artificial Sequence: Synthetic peptide
GISSDGSKVYADSVKG

SEQ ID NO: 2284 - protein, 16 aa, synthetic construct
  REGION 1..16: note = Description of Artificial Sequence: Synthetic peptide
GISSDGSSVYADSVKG

SEQ ID NO: 2285 - protein, 16 aa, synthetic construct
  REGION 1..16: note = Description of Artificial Sequence: Synthetic peptide
GISSDGSKVYADSVKG

SEQ ID NO: 2286 - protein, 16 aa, synthetic construct
  REGION 1..16: note = Description of Artificial Sequence: Synthetic peptide
GISSDGSKLYADSVKG

SEQ ID NO: 2287 - protein, 16 aa, synthetic construct
  REGION 1..16: note = Description of Artificial Sequence: Synthetic peptide
GISSDGSKVYADSVKG

SEQ ID NO: 2288 - protein, 16 aa, synthetic construct
  REGION 1..16: note = Description of Artificial Sequence: Synthetic peptide
GISSDGSKVYIDSVKG

SEQ ID NO: 2289 - protein, 16 aa, synthetic construct
  REGION 1..16: note = Description of Artificial Sequence: Synthetic peptide
GISSDGSKVYSDSVKG

SEQ ID NO: 2290 - protein, 16 aa, synthetic construct
  REGION 1..16: note = Description of Artificial Sequence: Synthetic peptide
GISSDGSKVIADSVKG

SEQ ID NO: 2291 - protein, 16 aa, synthetic construct
  REGION 1..16: note = Description of Artificial Sequence: Synthetic peptide
GISSDGSKIYADSVKG

SEQ ID NO: 2292 - protein, 16 aa, synthetic construct
  REGION 1..16: note = Description of Artificial Sequence: Synthetic peptide
GISSDGSKVYTDSVKG

SEQ ID NO: 2293 - protein, 16 aa, synthetic construct
  REGION 1..16: note = Description of Artificial Sequence: Synthetic peptide
GISSDGSLVYADSVKG

SEQ ID NO: 2294 - protein, 16 aa, synthetic construct
  REGION 1..16: note = Description of Artificial Sequence: Synthetic peptide
GISSDGSKVYADSVKG

SEQ ID NO: 2295 - protein, 16 aa, synthetic construct
  REGION 1..16: note = Description of Artificial Sequence: Synthetic peptide
GISSDGSKVYSDSVKG

SEQ ID NO: 2296 - protein, 16 aa, synthetic construct
  REGION 1..16: note = Description of Artificial Sequence: Synthetic peptide
GISSDGSKVYVDSVKG

SEQ ID NO: 2297 - protein, 16 aa, synthetic construct
  REGION 1..16: note = Description of Artificial Sequence: Synthetic peptide
GISSDGSKVYVDSVKG

SEQ ID NO: 2298 - protein, 16 aa, synthetic construct
  REGION 1..16: note = Description of Artificial Sequence: Synthetic peptide
GISSDGSKVYADSVKG

SEQ ID NO: 2299 - protein, 16 aa, synthetic construct
  REGION 1..16: note = Description of Artificial Sequence: Synthetic peptide
GISSDGSKVYADSVKG

SEQ ID NO: 2300 - protein, 16 aa, synthetic construct
  REGION 1..16: note = Description of Artificial Sequence: Synthetic peptide
GISSDGSKVYRDSVKG

SEQ ID NO: 2301 - protein, 16 aa, synthetic construct
  REGION 1..16: note = Description of Artificial Sequence: Synthetic peptide
GISSDGSKVYSDSVKG

SEQ ID NO: 2302 - protein, 16 aa, synthetic construct
  REGION 1..16: note = Description of Artificial Sequence: Synthetic peptide
GISSDNSKVYADSVKG

SEQ ID NO: 2303 - protein, 16 aa, synthetic construct
  REGION 1..16: note = Description of Artificial Sequence: Synthetic peptide
GISSDGSKVYADSVKG

SEQ ID NO: 2304 - protein, 16 aa, synthetic construct
  REGION 1..16: note = Description of Artificial Sequence: Synthetic peptide
GISSDGSKVYADSVKG

SEQ ID NO: 2305 - protein, 16 aa, synthetic construct
  REGION 1..16: note = Description of Artificial Sequence: Synthetic peptide
GISSDGSKVYEDSVKG

SEQ ID NO: 2306 - protein, 16 aa, synthetic construct
  REGION 1..16: note = Description of Artificial Sequence: Synthetic peptide
GISSDGSKVYADSVKG

SEQ ID NO: 2307 - protein, 16 aa, synthetic construct
  REGION 1..16: note = Description of Artificial Sequence: Synthetic peptide
GISSDGSKVYAVSVKG

SEQ ID NO: 2308 - protein, 16 aa, synthetic construct
  REGION 1..16: note = Description of Artificial Sequence: Synthetic peptide
GVSSDGSKVYADSVKG

SEQ ID NO: 2309 - protein, 16 aa, synthetic construct
  REGION 1..16: note = Description of Artificial Sequence: Synthetic peptide
GISSDGSKVYEDSVKG

SEQ ID NO: 2310 - protein, 16 aa, synthetic construct
  REGION 1..16: note = Description of Artificial Sequence: Synthetic peptide
GISSDGSKVYAGSVKG

SEQ ID NO: 2311 - protein, 16 aa, synthetic construct
  REGION 1..16: note = Description of Artificial Sequence: Synthetic peptide
GISSDKSKVYADSVKG

SEQ ID NO: 2312 - protein, 16 aa, synthetic construct
  REGION 1..16: note = Description of Artificial Sequence: Synthetic peptide
GISSNGSKVYADSVKG

SEQ ID NO: 2313 - protein, 16 aa, synthetic construct
  REGION 1..16: note = Description of Artificial Sequence: Synthetic peptide
GISSDGSKVLADSVKG

SEQ ID NO: 2314 - protein, 16 aa, synthetic construct
  REGION 1..16: note = Description of Artificial Sequence: Synthetic peptide
GISSDGSKVYADSVKG

SEQ ID NO: 2315 - protein, 16 aa, synthetic construct
  REGION 1..16: note = Description of Artificial Sequence: Synthetic peptide
GISSDNSKVYADSVKG

SEQ ID NO: 2316 - protein, 16 aa, synthetic construct
  REGION 1..16: note = Description of Artificial Sequence: Synthetic peptide
GISSDGSKVYADSVKG

SEQ ID NO: 2317 - protein, 16 aa, synthetic construct
  REGION 1..16: note = Description of Artificial Sequence: Synthetic peptide
GISSDGSKVYTDSVKG

SEQ ID NO: 2318 - protein, 16 aa, synthetic construct
  REGION 1..16: note = Description of Artificial Sequence: Synthetic peptide
GISSDGSKVYTDSVKG

SEQ ID NO: 2319 - protein, 16 aa, synthetic construct
  REGION 1..16: note = Description of Artificial Sequence: Synthetic peptide
GISSDNSKVYADSVKG

SEQ ID NO: 2320 - protein, 16 aa, synthetic construct
  REGION 1..16: note = Description of Artificial Sequence: Synthetic peptide
GISSDGSRVYADSVKG

SEQ ID NO: 2321 - protein, 16 aa, synthetic construct
  REGION 1..16: note = Description of Artificial Sequence: Synthetic peptide
GISSDGSQVYADSVKG

SEQ ID NO: 2322 - protein, 16 aa, synthetic construct
  REGION 1..16: note = Description of Artificial Sequence: Synthetic peptide
GISSDGSKAYADSVKG

SEQ ID NO: 2323 - protein, 16 aa, synthetic construct
  REGION 1..16: note = Description of Artificial Sequence: Synthetic peptide
GISSDGSKVYAKSAKG

SEQ ID NO: 2324 - protein, 16 aa, synthetic construct
  REGION 1..16: note = Description of Artificial Sequence: Synthetic peptide
GISSDGSKVYNDSVKG

SEQ ID NO: 2325 - protein, 16 aa, synthetic construct
  REGION 1..16: note = Description of Artificial Sequence: Synthetic peptide
GISSDGSKVIADSVKG

SEQ ID NO: 2326 - protein, 16 aa, synthetic construct
  REGION 1..16: note = Description of Artificial Sequence: Synthetic peptide
GISSDGSKVYTDSVKG

SEQ ID NO: 2327 - protein, 16 aa, synthetic construct
  REGION 1..16: note = Description of Artificial Sequence: Synthetic peptide
GISSDGSKVYIDSVKG

SEQ ID NO: 2328 - protein, 16 aa, synthetic construct
  REGION 1..16: note = Description of Artificial Sequence: Synthetic peptide
GISSDGSKVYYDSVKG

SEQ ID NO: 2329 - protein, 16 aa, synthetic construct
  REGION 1..16: note = Description of Artificial Sequence: Synthetic peptide
GISSDGSKVYVDSVKG

SEQ ID NO: 2330 - protein, 16 aa, synthetic construct
  REGION 1..16: note = Description of Artificial Sequence: Synthetic peptide
GISSDGSKVYGDSVKG

SEQ ID NO: 2331 - protein, 16 aa, synthetic construct
  REGION 1..16: note = Description of Artificial Sequence: Synthetic peptide
GISSDQSKVYADSAKG

SEQ ID NO: 2332 - protein, 16 aa, synthetic construct
  REGION 1..16: note = Description of Artificial Sequence: Synthetic peptide
GISSDGSKVYSDSVKG

SEQ ID NO: 2333 - protein, 16 aa, synthetic construct
  REGION 1..16: note = Description of Artificial Sequence: Synthetic peptide
GISSDGSKVYADSVKG

SEQ ID NO: 2334 - protein, 16 aa, synthetic construct
  REGION 1..16: note = Description of Artificial Sequence: Synthetic peptide
GISSDGSKVIADSVKG

SEQ ID NO: 2335 - protein, 16 aa, synthetic construct
  REGION 1..16: note = Description of Artificial Sequence: Synthetic peptide
GISSDGSKVDADSVKG

SEQ ID NO: 2336 - protein, 16 aa, synthetic construct
  REGION 1..16: note = Description of Artificial Sequence: Synthetic peptide
GISSDGSKVYKDSVKG

SEQ ID NO: 2337 - protein, 16 aa, synthetic construct
  REGION 1..16: note = Description of Artificial Sequence: Synthetic peptide
GISSNGSKVYADSVKG

SEQ ID NO: 2338 - protein, 16 aa, synthetic construct
  REGION 1..16: note = Description of Artificial Sequence: Synthetic peptide
GISSDGSKVYKDSVKG

SEQ ID NO: 2339 - protein, 16 aa, synthetic construct
  REGION 1..16: note = Description of Artificial Sequence: Synthetic peptide
GISSDGSKVYADSVKG

SEQ ID NO: 2340 - protein, 16 aa, synthetic construct
  REGION 1..16: note = Description of Artificial Sequence: Synthetic peptide
GISSDGSKVYQDSVKG

SEQ ID NO: 2341 - protein, 16 aa, synthetic construct
  REGION 1..16: note = Description of Artificial Sequence: Synthetic peptide
GISSDGSKVYAESVKG

SEQ ID NO: 2342 - protein, 16 aa, synthetic construct
  REGION 1..16: note = Description of Artificial Sequence: Synthetic peptide
GISSDGSKVLADSVKG

SEQ ID NO: 2343 - protein, 16 aa, synthetic construct
  REGION 1..16: note = Description of Artificial Sequence: Synthetic peptide
GISSDGSKYYADSVKG

SEQ ID NO: 2344 - protein, 16 aa, synthetic construct
  REGION 1..16: note = Description of Artificial Sequence: Synthetic peptide
GISSDGSKVYAVSVKG

SEQ ID NO: 2345 - protein, 16 aa, synthetic construct
  REGION 1..16: note = Description of Artificial Sequence: Synthetic peptide
GISSDGSKVVADSVKG

SEQ ID NO: 2346 - protein, 16 aa, synthetic construct
  REGION 1..16: note = Description of Artificial Sequence: Synthetic peptide
GISSDGSKVYADSVKG

SEQ ID NO: 2347 - protein, 16 aa, synthetic construct
  REGION 1..16: note = Description of Artificial Sequence: Synthetic peptide
GISSDGSKVYADSVKG

SEQ ID NO: 2348 - protein, 16 aa, synthetic construct
  REGION 1..16: note = Description of Artificial Sequence: Synthetic peptide
GISSDNSKVYADSVKG

SEQ ID NO: 2349 - protein, 16 aa, synthetic construct
  REGION 1..16: note = Description of Artificial Sequence: Synthetic peptide
GISSDGSKVYAQSVKG

SEQ ID NO: 2350 - protein, 16 aa, synthetic construct
  REGION 1..16: note = Description of Artificial Sequence: Synthetic peptide
GISSDGSKVYVDSVKG

SEQ ID NO: 2351 - protein, 16 aa, synthetic construct
  REGION 1..16: note = Description of Artificial Sequence: Synthetic peptide
GISSDGSKVYSDSVKG

SEQ ID NO: 2352 - protein, 16 aa, synthetic construct
  REGION 1..16: note = Description of Artificial Sequence: Synthetic peptide
GISSDGSKVLADSVKG

SEQ ID NO: 2353 - protein, 16 aa, synthetic construct
  REGION 1..16: note = Description of Artificial Sequence: Synthetic peptide
GISSDGSKVYNDSVKG

SEQ ID NO: 2354 - protein, 16 aa, synthetic construct
  REGION 1..16: note = Description of Artificial Sequence: Synthetic peptide
GISSDGSKVYNDSVKG

SEQ ID NO: 2355 - protein, 16 aa, synthetic construct
  REGION 1..16: note = Description of Artificial Sequence: Synthetic peptide
GISSDGSKVYVDSVKG

SEQ ID NO: 2356 - protein, 16 aa, synthetic construct
  REGION 1..16: note = Description of Artificial Sequence: Synthetic peptide
GISSDGSKVVADSVKG

SEQ ID NO: 2357 - protein, 16 aa, synthetic construct
  REGION 1..16: note = Description of Artificial Sequence: Synthetic peptide
GISSDGSKVYGDSVKG

SEQ ID NO: 2358 - protein, 16 aa, synthetic construct
  REGION 1..16: note = Description of Artificial Sequence: Synthetic peptide
GISSDGSKVYTDSVKG

SEQ ID NO: 2359 - protein, 16 aa, synthetic construct
  REGION 1..16: note = Description of Artificial Sequence: Synthetic peptide
GISSDGSKVYNDSVKG

SEQ ID NO: 2360 - protein, 16 aa, synthetic construct
  REGION 1..16: note = Description of Artificial Sequence: Synthetic peptide
GISSDGSKVTADSVKG

SEQ ID NO: 2361 - protein, 16 aa, synthetic construct
  REGION 1..16: note = Description of Artificial Sequence: Synthetic peptide
GISSDGSKVYRDSVKG

SEQ ID NO: 2362 - protein, 16 aa, synthetic construct
  REGION 1..16: note = Description of Artificial Sequence: Synthetic peptide
GISSNGSKVYSDSVKG

SEQ ID NO: 2363 - protein, 16 aa, synthetic construct
  REGION 1..16: note = Description of Artificial Sequence: Synthetic peptide
GISSDGSKVYSDSVKG

SEQ ID NO: 2364 - protein, 16 aa, synthetic construct
  REGION 1..16: note = Description of Artificial Sequence: Synthetic peptide
GISSDGSKVYADSVKG

SEQ ID NO: 2365 - protein, 16 aa, synthetic construct
  REGION 1..16: note = Description of Artificial Sequence: Synthetic peptide
GISSDGSKVYADSVKG

SEQ ID NO: 2366 - protein, 16 aa, synthetic construct
  REGION 1..16: note = Description of Artificial Sequence: Synthetic peptide
GISSDGSLVYADSVKG

SEQ ID NO: 2367 - protein, 16 aa, synthetic construct
  REGION 1..16: note = Description of Artificial Sequence: Synthetic peptide
GISSDGTKVYADSVKG

SEQ ID NO: 2368 - protein, 16 aa, synthetic construct
  REGION 1..16: note = Description of Artificial Sequence: Synthetic peptide
GISSDGSKVYADSVKG

SEQ ID NO: 2369 - protein, 16 aa, synthetic construct
  REGION 1..16: note = Description of Artificial Sequence: Synthetic peptide
GISSDGSKLYLDSVKG

SEQ ID NO: 2370 - protein, 16 aa, synthetic construct
  REGION 1..16: note = Description of Artificial Sequence: Synthetic peptide
GISSDGSRVYADSVKG

SEQ ID NO: 2371 - protein, 16 aa, synthetic construct
  REGION 1..16: note = Description of Artificial Sequence: Synthetic peptide
GISSDGSKVYNDSVKG

SEQ ID NO: 2372 - protein, 16 aa, synthetic construct
  REGION 1..16: note = Description of Artificial Sequence: Synthetic peptide
GISSDGSKVYADSVKG

SEQ ID NO: 2373 - protein, 16 aa, synthetic construct
  REGION 1..16: note = Description of Artificial Sequence: Synthetic peptide
GISSDGSKVYVDSVKG

SEQ ID NO: 2374 - protein, 16 aa, synthetic construct
  REGION 1..16: note = Description of Artificial Sequence: Synthetic peptide
GISSDGSKLYADSVKG

SEQ ID NO: 2375 - protein, 16 aa, synthetic construct
  REGION 1..16: note = Description of Artificial Sequence: Synthetic peptide
GISSDGSKVYKDSVKG

SEQ ID NO: 2376 - protein, 16 aa, synthetic construct
  REGION 1..16: note = Description of Artificial Sequence: Synthetic peptide
GISSDGSKVYADSVKG

SEQ ID NO: 2377 - protein, 16 aa, synthetic construct
  REGION 1..16: note = Description of Artificial Sequence: Synthetic peptide
GISSDGSKVYQDSVKG

SEQ ID NO: 2378 - protein, 16 aa, synthetic construct
  REGION 1..16: note = Description of Artificial Sequence: Synthetic peptide
GISSDGTKIYADSAKV

SEQ ID NO: 2379 - protein, 16 aa, synthetic construct
  REGION 1..16: note = Description of Artificial Sequence: Synthetic peptide
GISSDRSKVYADSVKG

SEQ ID NO: 2380 - protein, 16 aa, synthetic construct
  REGION 1..16: note = Description of Artificial Sequence: Synthetic peptide
GISSDGSLVYADSVKG

SEQ ID NO: 2381 - protein, 16 aa, synthetic construct
  REGION 1..16: note = Description of Artificial Sequence: Synthetic peptide
GISSDGSKVYADSVKG

SEQ ID NO: 2382 - protein, 16 aa, synthetic construct
  REGION 1..16: note = Description of Artificial Sequence: Synthetic peptide
GISSDGSKVYRDSVKG

SEQ ID NO: 2383 - protein, 16 aa, synthetic construct
  REGION 1..16: note = Description of Artificial Sequence: Synthetic peptide
GISSDGSKVYADSVKG

SEQ ID NO: 2384 - protein, 16 aa, synthetic construct
  REGION 1..16: note = Description of Artificial Sequence: Synthetic peptide
GISSDGSKVYSDSVKG

SEQ ID NO: 2385 - protein, 16 aa, synthetic construct
  REGION 1..16: note = Description of Artificial Sequence: Synthetic peptide
GISSDGTKVYRDSVKG

SEQ ID NO: 2386 - protein, 16 aa, synthetic construct
  REGION 1..16: note = Description of Artificial Sequence: Synthetic peptide
GISSDGSKVYNDSVKG

SEQ ID NO: 2387 - protein, 16 aa, synthetic construct
  REGION 1..16: note = Description of Artificial Sequence: Synthetic peptide
GISSDGSKVYADSVKG

SEQ ID NO: 2388 - protein, 16 aa, synthetic construct
  REGION 1..16: note = Description of Artificial Sequence: Synthetic peptide
GISSDGSKVYADSVKG

SEQ ID NO: 2389 - protein, 16 aa, synthetic construct
  REGION 1..16: note = Description of Artificial Sequence: Synthetic peptide
GISSDGSKVYTDSVKG

SEQ ID NO: 2390 - protein, 16 aa, synthetic construct
  REGION 1..16: note = Description of Artificial Sequence: Synthetic peptide
GISPDGTKAYADSAKV

SEQ ID NO: 2391 - protein, 16 aa, synthetic construct
  REGION 1..16: note = Description of Artificial Sequence: Synthetic peptide
GISSDGSKVYVDSVKG

SEQ ID NO: 2392 - protein, 16 aa, synthetic construct
  REGION 1..16: note = Description of Artificial Sequence: Synthetic peptide
GISSDGSKVYSDSVKG

SEQ ID NO: 2393 - protein, 16 aa, synthetic construct
  REGION 1..16: note = Description of Artificial Sequence: Synthetic peptide
GISSDGSKVYASSVKG

SEQ ID NO: 2394 - protein, 16 aa, synthetic construct
  REGION 1..16: note = Description of Artificial Sequence: Synthetic peptide
GISADGSKVYADSVKG

SEQ ID NO: 2395 - protein, 16 aa, synthetic construct
  REGION 1..16: note = Description of Artificial Sequence: Synthetic peptide
GISSDGSKVYASSAKG

SEQ ID NO: 2396 - protein, 16 aa, synthetic construct
  REGION 1..16: note = Description of Artificial Sequence: Synthetic peptide
GISSDGSKVYADSVKG

SEQ ID NO: 2397 - protein, 16 aa, synthetic construct
  REGION 1..16: note = Description of Artificial Sequence: Synthetic peptide
GISSDGSSVYADSVKG

SEQ ID NO: 2398 - protein, 16 aa, synthetic construct
  REGION 1..16: note = Description of Artificial Sequence: Synthetic peptide
GISSDGSKVYSDSVKG

SEQ ID NO: 2399 - protein, 16 aa, synthetic construct
  REGION 1..16: note = Description of Artificial Sequence: Synthetic peptide
GISSDGSKVYAGSVKG

SEQ ID NO: 2400 - protein, 16 aa, synthetic construct
  REGION 1..16: note = Description of Artificial Sequence: Synthetic peptide
GISSDNSKVYADSVKG

SEQ ID NO: 2401 - protein, 16 aa, synthetic construct
  REGION 1..16: note = Description of Artificial Sequence: Synthetic peptide
GISSDGSAVYADSVKG

SEQ ID NO: 2402 - protein, 16 aa, synthetic construct
  REGION 1..16: note = Description of Artificial Sequence: Synthetic peptide
GISSDGSSVYADSVKG

SEQ ID NO: 2403 - protein, 16 aa, synthetic construct
  REGION 1..16: note = Description of Artificial Sequence: Synthetic peptide
GISSNGTKVYADSAKV

SEQ ID NO: 2404 - protein, 16 aa, synthetic construct
  REGION 1..16: note = Description of Artificial Sequence: Synthetic peptide
GISSDGSKLYADSVKG

SEQ ID NO: 2405 - protein, 16 aa, synthetic construct
  REGION 1..16: note = Description of Artificial Sequence: Synthetic peptide
GISSDGSKVYKDSVKG

SEQ ID NO: 2406 - protein, 16 aa, synthetic construct
  REGION 1..16: note = Description of Artificial Sequence: Synthetic peptide
GISSDGSLVYADSVKG

SEQ ID NO: 2407 - protein, 16 aa, synthetic construct
  REGION 1..16: note = Description of Artificial Sequence: Synthetic peptide
GISSDGSLVYADSVKG

SEQ ID NO: 2408 - protein, 16 aa, synthetic construct
  REGION 1..16: note = Description of Artificial Sequence: Synthetic peptide
GISSDGSKVYADSVKG

SEQ ID NO: 2409 - protein, 16 aa, synthetic construct
  REGION 1..16: note = Description of Artificial Sequence: Synthetic peptide
GISSDGSKVYADSVKG

SEQ ID NO: 2410 - protein, 16 aa, synthetic construct
  REGION 1..16: note = Description of Artificial Sequence: Synthetic peptide
GVSSDGSKVYADSVKG

SEQ ID NO: 2411 - protein, 16 aa, synthetic construct
  REGION 1..16: note = Description of Artificial Sequence: Synthetic peptide
GISRDGSKVYADSVKG

SEQ ID NO: 2412 - protein, 16 aa, synthetic construct
  REGION 1..16: note = Description of Artificial Sequence: Synthetic peptide
GISSDGSKLYADSVKG

SEQ ID NO: 2413 - protein, 16 aa, synthetic construct
  REGION 1..16: note = Description of Artificial Sequence: Synthetic peptide
GISSDGSKVYADSVKG

SEQ ID NO: 2414 - protein, 16 aa, synthetic construct
  REGION 1..16: note = Description of Artificial Sequence: Synthetic peptide
GISSDGSKVYADSVKG

SEQ ID NO: 2415 - protein, 16 aa, synthetic construct
  REGION 1..16: note = Description of Artificial Sequence: Synthetic peptide
GISSDGSKVYADSVKG

SEQ ID NO: 2416 - protein, 16 aa, synthetic construct
  REGION 1..16: note = Description of Artificial Sequence: Synthetic peptide
GISSDTSKVYADSVKG

SEQ ID NO: 2417 - protein, 16 aa, synthetic construct
  REGION 1..16: note = Description of Artificial Sequence: Synthetic peptide
GISSDGSKVYADSVKG

SEQ ID NO: 2418 - protein, 16 aa, synthetic construct
  REGION 1..16: note = Description of Artificial Sequence: Synthetic peptide
GISSDGSTVYADSVKG

SEQ ID NO: 2419 - protein, 16 aa, synthetic construct
  REGION 1..16: note = Description of Artificial Sequence: Synthetic peptide
GISKDGSKVYADSAKG

SEQ ID NO: 2420 - protein, 16 aa, synthetic construct
  REGION 1..16: note = Description of Artificial Sequence: Synthetic peptide
GISSDGSKVYSDSVKG

SEQ ID NO: 2421 - protein, 16 aa, synthetic construct
  REGION 1..16: note = Description of Artificial Sequence: Synthetic peptide
GISSDGSKVYSDSVKG

SEQ ID NO: 2422 - protein, 16 aa, synthetic construct
  REGION 1..16: note = Description of Artificial Sequence: Synthetic peptide
GISADGSTDYIDSVKG

SEQ ID NO: 2423 - protein, 16 aa, synthetic construct
  REGION 1..16: note = Description of Artificial Sequence: Synthetic peptide
GISADGSTAYIDSVKG

SEQ ID NO: 2424 - protein, 16 aa, synthetic construct
  REGION 1..16: note = Description of Artificial Sequence: Synthetic peptide
GISRDGSTDYIDSVKG

SEQ ID NO: 2425 - protein, 16 aa, synthetic construct
  REGION 1..16: note = Description of Artificial Sequence: Synthetic peptide
GISRDGSTDYIDSVKG

SEQ ID NO: 2426 - protein, 16 aa, synthetic construct
  REGION 1..16: note = Description of Artificial Sequence: Synthetic peptide
GISEAGSTDYIDSVKG

SEQ ID NO: 2427 - protein, 16 aa, synthetic construct
  REGION 1..16: note = Description of Artificial Sequence: Synthetic peptide
GISADGSTDYVDSVKG

SEQ ID NO: 2428 - protein, 16 aa, synthetic construct
  REGION 1..16: note = Description of Artificial Sequence: Synthetic peptide
GISADGSTDYIRSVKG

SEQ ID NO: 2429 - protein, 16 aa, synthetic construct
  REGION 1..16: note = Description of Artificial Sequence: Synthetic peptide
GISADGSVDYIDSVKG

SEQ ID NO: 2430 - protein, 16 aa, synthetic construct
  REGION 1..16: note = Description of Artificial Sequence: Synthetic peptide
GISADGSTLYIDSVKG

SEQ ID NO: 2431 - protein, 16 aa, synthetic construct
  REGION 1..16: note = Description of Artificial Sequence: Synthetic peptide
GISTDGSTDYIDSVKG

SEQ ID NO: 2432 - protein, 16 aa, synthetic construct
  REGION 1..16: note = Description of Artificial Sequence: Synthetic peptide
GISGDGSTDYIDSVKG

SEQ ID NO: 2433 - protein, 16 aa, synthetic construct
  REGION 1..16: note = Description of Artificial Sequence: Synthetic peptide
GISADGSTDYINSVKG

SEQ ID NO: 2434 - protein, 16 aa, synthetic construct
  REGION 1..16: note = Description of Artificial Sequence: Synthetic peptide
GISARGSTDYIDSVKG

SEQ ID NO: 2435 - protein, 16 aa, synthetic construct
  REGION 1..16: note = Description of Artificial Sequence: Synthetic peptide
GISADGSTTYIDSVKG

SEQ ID NO: 2436 - protein, 16 aa, synthetic construct
  REGION 1..16: note = Description of Artificial Sequence: Synthetic peptide
GISKDGSTDYIDSVKG

SEQ ID NO: 2437 - protein, 16 aa, synthetic construct
  REGION 1..16: note = Description of Artificial Sequence: Synthetic peptide
GISADGSTTYIDSVKG

SEQ ID NO: 2438 - protein, 16 aa, synthetic construct
  REGION 1..16: note = Description of Artificial Sequence: Synthetic peptide
GISANGSTDYIDSVKG

SEQ ID NO: 2439 - protein, 16 aa, synthetic construct
  REGION 1..16: note = Description of Artificial Sequence: Synthetic peptide
GISRDGSTDYIDSVKG

SEQ ID NO: 2440 - protein, 16 aa, synthetic construct
  REGION 1..16: note = Description of Artificial Sequence: Synthetic peptide
GISADGSADYIDSVKG

SEQ ID NO: 2441 - protein, 16 aa, synthetic construct
  REGION 1..16: note = Description of Artificial Sequence: Synthetic peptide
GISAHGSTDYIDSVKG

SEQ ID NO: 2442 - protein, 16 aa, synthetic construct
  REGION 1..16: note = Description of Artificial Sequence: Synthetic peptide
GISADGSTIYIDSVKG

SEQ ID NO: 2443 - protein, 16 aa, synthetic construct
  REGION 1..16: note = Description of Artificial Sequence: Synthetic peptide
GISRDGSTVYIDSVKG

SEQ ID NO: 2444 - protein, 16 aa, synthetic construct
  REGION 1..16: note = Description of Artificial Sequence: Synthetic peptide
GISADGPTDYIDSVKG

SEQ ID NO: 2445 - protein, 16 aa, synthetic construct
  REGION 1..16: note = Description of Artificial Sequence: Synthetic peptide
GISADGSTTYIDSVKG

SEQ ID NO: 2446 - protein, 16 aa, synthetic construct
  REGION 1..16: note = Description of Artificial Sequence: Synthetic peptide
GISADGSTDYIASVKG

SEQ ID NO: 2447 - protein, 16 aa, synthetic construct
  REGION 1..16: note = Description of Artificial Sequence: Synthetic peptide
GISLDGSTDYIDSVKG

SEQ ID NO: 2448 - protein, 16 aa, synthetic construct
  REGION 1..16: note = Description of Artificial Sequence: Synthetic peptide
GISADGSTIYIDSVKG

SEQ ID NO: 2449 - protein, 16 aa, synthetic construct
  REGION 1..16: note = Description of Artificial Sequence: Synthetic peptide
GISAHGSTDYIDSVKG

SEQ ID NO: 2450 - protein, 16 aa, synthetic construct
  REGION 1..16: note = Description of Artificial Sequence: Synthetic peptide
GISRDGSTDYIDSVKG

SEQ ID NO: 2451 - protein, 16 aa, synthetic construct
  REGION 1..16: note = Description of Artificial Sequence: Synthetic peptide
GISRDGSTDYIDSVKG

SEQ ID NO: 2452 - protein, 16 aa, synthetic construct
  REGION 1..16: note = Description of Artificial Sequence: Synthetic peptide
GISADGSMDYIDSVKG

SEQ ID NO: 2453 - protein, 16 aa, synthetic construct
  REGION 1..16: note = Description of Artificial Sequence: Synthetic peptide
GISADGSTDYIDSVKG

SEQ ID NO: 2454 - protein, 16 aa, synthetic construct
  REGION 1..16: note = Description of Artificial Sequence: Synthetic peptide
GISADGSTDYIDSVKG

SEQ ID NO: 2455 - protein, 16 aa, synthetic construct
  REGION 1..16: note = Description of Artificial Sequence: Synthetic peptide
GISANGSTDYIDSVKG

SEQ ID NO: 2456 - protein, 16 aa, synthetic construct
  REGION 1..16: note = Description of Artificial Sequence: Synthetic peptide
GISANGSTTYIDSVKG

SEQ ID NO: 2457 - protein, 16 aa, synthetic construct
  REGION 1..16: note = Description of Artificial Sequence: Synthetic peptide
GISADGSTSYIDSVKG

SEQ ID NO: 2458 - protein, 16 aa, synthetic construct
  REGION 1..16: note = Description of Artificial Sequence: Synthetic peptide
GISADGSRDYIDSVKG

SEQ ID NO: 2459 - protein, 16 aa, synthetic construct
  REGION 1..16: note = Description of Artificial Sequence: Synthetic peptide
GISADGSTMYIDSVKG

SEQ ID NO: 2460 - protein, 16 aa, synthetic construct
  REGION 1..16: note = Description of Artificial Sequence: Synthetic peptide
GISPDGSTDYIDSVKG

SEQ ID NO: 2461 - protein, 16 aa, synthetic construct
  REGION 1..16: note = Description of Artificial Sequence: Synthetic peptide
GISGDGSTDYIDSVKG

SEQ ID NO: 2462 - protein, 16 aa, synthetic construct
  REGION 1..16: note = Description of Artificial Sequence: Synthetic peptide
GISRDGSTDYIDSVKG

SEQ ID NO: 2463 - protein, 16 aa, synthetic construct
  REGION 1..16: note = Description of Artificial Sequence: Synthetic peptide
GISRDGSTDYIDSVKG

SEQ ID NO: 2464 - protein, 16 aa, synthetic construct
  REGION 1..16: note = Description of Artificial Sequence: Synthetic peptide
GISRDGSTDYIDSVKG

SEQ ID NO: 2465 - protein, 16 aa, synthetic construct
  REGION 1..16: note = Description of Artificial Sequence: Synthetic peptide
GISADGSTDYIDSVKG

SEQ ID NO: 2466 - protein, 16 aa, synthetic construct
  REGION 1..16: note = Description of Artificial Sequence: Synthetic peptide
GISTDGSTDYIDSVKG

SEQ ID NO: 2467 - protein, 16 aa, synthetic construct
  REGION 1..16: note = Description of Artificial Sequence: Synthetic peptide
GISADGSTSYIDSVKG

SEQ ID NO: 2468 - protein, 16 aa, synthetic construct
  REGION 1..16: note = Description of Artificial Sequence: Synthetic peptide
GISADGSTLYIDSVKG

SEQ ID NO: 2469 - protein, 16 aa, synthetic construct
  REGION 1..16: note = Description of Artificial Sequence: Synthetic peptide
GISRDGSTDYIDSVKG

SEQ ID NO: 2470 - protein, 16 aa, synthetic construct
  REGION 1..16: note = Description of Artificial Sequence: Synthetic peptide
GISADGSTVYIDSVKG

SEQ ID NO: 2471 - protein, 16 aa, synthetic construct
  REGION 1..16: note = Description of Artificial Sequence: Synthetic peptide
GISTDGSTDYIDSVKG

SEQ ID NO: 2472 - protein, 16 aa, synthetic construct
  REGION 1..16: note = Description of Artificial Sequence: Synthetic peptide
GISADGSTLYIDSVKG

SEQ ID NO: 2473 - protein, 16 aa, synthetic construct
  REGION 1..16: note = Description of Artificial Sequence: Synthetic peptide
GISADGRTDYIDSVKG

SEQ ID NO: 2474 - protein, 16 aa, synthetic construct
  REGION 1..16: note = Description of Artificial Sequence: Synthetic peptide
GISADGSTIYIDSVKG

SEQ ID NO: 2475 - protein, 16 aa, synthetic construct
  REGION 1..16: note = Description of Artificial Sequence: Synthetic peptide
GISADGSTLYIDSVKG

SEQ ID NO: 2476 - protein, 16 aa, synthetic construct
  REGION 1..16: note = Description of Artificial Sequence: Synthetic peptide
GISRDGSTDYIDSVKG

SEQ ID NO: 2477 - protein, 16 aa, synthetic construct
  REGION 1..16: note = Description of Artificial Sequence: Synthetic peptide
GISKDGSTDYIDSVKG

SEQ ID NO: 2478 - protein, 16 aa, synthetic construct
  REGION 1..16: note = Description of Artificial Sequence: Synthetic peptide
GISADGSTDYIGSVKG

SEQ ID NO: 2479 - protein, 16 aa, synthetic construct
  REGION 1..16: note = Description of Artificial Sequence: Synthetic peptide
GISVDGSTDYIDSVKG

SEQ ID NO: 2480 - protein, 16 aa, synthetic construct
  REGION 1..16: note = Description of Artificial Sequence: Synthetic peptide
GISADGSTGYIDSVKG

SEQ ID NO: 2481 - protein, 16 aa, synthetic construct
  REGION 1..16: note = Description of Artificial Sequence: Synthetic peptide
GISGDGSTTYIDSVKG

SEQ ID NO: 2482 - protein, 16 aa, synthetic construct
  REGION 1..16: note = Description of Artificial Sequence: Synthetic peptide
GISTDGSTDYIDSVKG

SEQ ID NO: 2483 - protein, 16 aa, synthetic construct
  REGION 1..16: note = Description of Artificial Sequence: Synthetic peptide
GISADGSTDYFDSVKG

SEQ ID NO: 2484 - protein, 16 aa, synthetic construct
  REGION 1..16: note = Description of Artificial Sequence: Synthetic peptide
GISADGSTSYIDSVKG

SEQ ID NO: 2485 - protein, 16 aa, synthetic construct
  REGION 1..16: note = Description of Artificial Sequence: Synthetic peptide
GISADGSTDYIDSVKG

SEQ ID NO: 2486 - protein, 16 aa, synthetic construct
  REGION 1..16: note = Description of Artificial Sequence: Synthetic peptide
GISADGSTAYIDSVKG

SEQ ID NO: 2487 - protein, 16 aa, synthetic construct
  REGION 1..16: note = Description of Artificial Sequence: Synthetic peptide
GISADGSTVYIDSVKG

SEQ ID NO: 2488 - protein, 16 aa, synthetic construct
  REGION 1..16: note = Description of Artificial Sequence: Synthetic peptide
GISQDGSTDYIDSVKG

SEQ ID NO: 2489 - protein, 16 aa, synthetic construct
  REGION 1..16: note = Description of Artificial Sequence: Synthetic peptide
GISNDGSTDYIDSVKG

SEQ ID NO: 2490 - protein, 16 aa, synthetic construct
  REGION 1..16: note = Description of Artificial Sequence: Synthetic peptide
GISARGSTDYIDSVKG

SEQ ID NO: 2491 - protein, 16 aa, synthetic construct
  REGION 1..16: note = Description of Artificial Sequence: Synthetic peptide
GISADGSTDYIDSVKG

SEQ ID NO: 2492 - protein, 16 aa, synthetic construct
  REGION 1..16: note = Description of Artificial Sequence: Synthetic peptide
GISRDGSTDYIDSVKG

SEQ ID NO: 2493 - protein, 16 aa, synthetic construct
  REGION 1..16: note = Description of Artificial Sequence: Synthetic peptide
GISADGSTLYIDSVKG

SEQ ID NO: 2494 - protein, 16 aa, synthetic construct
  REGION 1..16: note = Description of Artificial Sequence: Synthetic peptide
GISADGSTNYIDSVKG

SEQ ID NO: 2495 - protein, 16 aa, synthetic construct
  REGION 1..16: note = Description of Artificial Sequence: Synthetic peptide
GISADGSTVYIDSVKG

SEQ ID NO: 2496 - protein, 16 aa, synthetic construct
  REGION 1..16: note = Description of Artificial Sequence: Synthetic peptide
GISADGSTTYIDSVKG

SEQ ID NO: 2497 - protein, 16 aa, synthetic construct
  REGION 1..16: note = Description of Artificial Sequence: Synthetic peptide
GISADGSTDYIGSVKG

SEQ ID NO: 2498 - protein, 16 aa, synthetic construct
  REGION 1..16: note = Description of Artificial Sequence: Synthetic peptide
GISRDGSTDYIDSVKG

SEQ ID NO: 2499 - protein, 16 aa, synthetic construct
  REGION 1..16: note = Description of Artificial Sequence: Synthetic peptide
GISADGSTTYIDSVKG

SEQ ID NO: 2500 - protein, 16 aa, synthetic construct
  REGION 1..16: note = Description of Artificial Sequence: Synthetic peptide
GVSSDGSTDYIDSVKG

SEQ ID NO: 2501 - protein, 16 aa, synthetic construct
  REGION 1..16: note = Description of Artificial Sequence: Synthetic peptide
GISADGHTDYIDSVKG

SEQ ID NO: 2502 - protein, 16 aa, synthetic construct
  REGION 1..16: note = Description of Artificial Sequence: Synthetic peptide
GISADGSTDYFDSVKG

SEQ ID NO: 2503 - protein, 16 aa, synthetic construct
  REGION 1..16: note = Description of Artificial Sequence: Synthetic peptide
GISADGSTVYIDSVKG

SEQ ID NO: 2504 - protein, 16 aa, synthetic construct
  REGION 1..16: note = Description of Artificial Sequence: Synthetic peptide
GISADGSTDYIASVKG

SEQ ID NO: 2505 - protein, 16 aa, synthetic construct
  REGION 1..16: note = Description of Artificial Sequence: Synthetic peptide
GISADGSTDYISSVKG

SEQ ID NO: 2506 - protein, 16 aa, synthetic construct
  REGION 1..16: note = Description of Artificial Sequence: Synthetic peptide
GISADGSTVYIDSVKG

SEQ ID NO: 2507 - protein, 16 aa, synthetic construct
  REGION 1..16: note = Description of Artificial Sequence: Synthetic peptide
GISADGSTVYIDSVKG

SEQ ID NO: 2508 - protein, 16 aa, synthetic construct
  REGION 1..16: note = Description of Artificial Sequence: Synthetic peptide
GISADGSTTYIDSVKG

SEQ ID NO: 2509 - protein, 16 aa, synthetic construct
  REGION 1..16: note = Description of Artificial Sequence: Synthetic peptide
GISVDGSTDYIDSVKG

SEQ ID NO: 2510 - protein, 16 aa, synthetic construct
  REGION 1..16: note = Description of Artificial Sequence: Synthetic peptide
GISADGSTAYIDSVKG

SEQ ID NO: 2511 - protein, 16 aa, synthetic construct
  REGION 1..16: note = Description of Artificial Sequence: Synthetic peptide
GISADGSTAYIDSVKG

SEQ ID NO: 2512 - protein, 16 aa, synthetic construct
  REGION 1..16: note = Description of Artificial Sequence: Synthetic peptide
GISADGSKDYIDSVKG

SEQ ID NO: 2513 - protein, 16 aa, synthetic construct
  REGION 1..16: note = Description of Artificial Sequence: Synthetic peptide
GISADGSTDYFDSVKG

SEQ ID NO: 2514 - protein, 16 aa, synthetic construct
  REGION 1..16: note = Description of Artificial Sequence: Synthetic peptide
GISADGSTDYIDSVKG

SEQ ID NO: 2515 - protein, 16 aa, synthetic construct
  REGION 1..16: note = Description of Artificial Sequence: Synthetic peptide
GISADGSTVYIDSVKG

SEQ ID NO: 2516 - protein, 16 aa, synthetic construct
  REGION 1..16: note = Description of Artificial Sequence: Synthetic peptide
GISADGSTVYIDSVKG

SEQ ID NO: 2517 - protein, 16 aa, synthetic construct
  REGION 1..16: note = Description of Artificial Sequence: Synthetic peptide
GISARGSTDYIDSVKG

SEQ ID NO: 2518 - protein, 16 aa, synthetic construct
  REGION 1..16: note = Description of Artificial Sequence: Synthetic peptide
GISATGSTDYIDSVKG

SEQ ID NO: 2519 - protein, 16 aa, synthetic construct
  REGION 1..16: note = Description of Artificial Sequence: Synthetic peptide
GISKDGSTDYIDSVKG

SEQ ID NO: 2520 - protein, 16 aa, synthetic construct
  REGION 1..16: note = Description of Artificial Sequence: Synthetic peptide
GISADGSTVYIDSVKG

SEQ ID NO: 2521 - protein, 16 aa, synthetic construct
  REGION 1..16: note = Description of Artificial Sequence: Synthetic peptide
GISPDGSTDYIDSVKG

SEQ ID NO: 2522 - protein, 16 aa, synthetic construct
  REGION 1..16: note = Description of Artificial Sequence: Synthetic peptide
GISADGSTHYIDSVKG

SEQ ID NO: 2523 - protein, 16 aa, synthetic construct
  REGION 1..16: note = Description of Artificial Sequence: Synthetic peptide
GISADGSTDYILSVKG

SEQ ID NO: 2524 - protein, 16 aa, synthetic construct
  REGION 1..16: note = Description of Artificial Sequence: Synthetic peptide
GISADGSTDYIHSVKG

SEQ ID NO: 2525 - protein, 16 aa, synthetic construct
  REGION 1..16: note = Description of Artificial Sequence: Synthetic peptide
GISVDGSTDYIDSVKG

SEQ ID NO: 2526 - protein, 16 aa, synthetic construct
  REGION 1..16: note = Description of Artificial Sequence: Synthetic peptide
GISRDGSTDYIDSVKG

SEQ ID NO: 2527 - protein, 16 aa, synthetic construct
  REGION 1..16: note = Description of Artificial Sequence: Synthetic peptide
GISADGSTVYIDSVKG

SEQ ID NO: 2528 - protein, 16 aa, synthetic construct
  REGION 1..16: note = Description of Artificial Sequence: Synthetic peptide
GISADGSTDYIRSVKG

SEQ ID NO: 2529 - protein, 16 aa, synthetic construct
  REGION 1..16: note = Description of Artificial Sequence: Synthetic peptide
GISADGSTMYIDSVKG

SEQ ID NO: 2530 - protein, 16 aa, synthetic construct
  REGION 1..16: note = Description of Artificial Sequence: Synthetic peptide
GISTDGSTDYIDSVKG

SEQ ID NO: 2531 - protein, 16 aa, synthetic construct
  REGION 1..16: note = Description of Artificial Sequence: Synthetic peptide
GISADGSTLYIDSVKG

SEQ ID NO: 2532 - protein, 16 aa, synthetic construct
  REGION 1..16: note = Description of Artificial Sequence: Synthetic peptide
GISADGSTDYIDSVKG

SEQ ID NO: 2533 - protein, 16 aa, synthetic construct
  REGION 1..16: note = Description of Artificial Sequence: Synthetic peptide
GISATGSTDYIDSVKG

SEQ ID NO: 2534 - protein, 16 aa, synthetic construct
  REGION 1..16: note = Description of Artificial Sequence: Synthetic peptide
GISHDGSTDYIDSVKG

SEQ ID NO: 2535 - protein, 16 aa, synthetic construct
  REGION 1..16: note = Description of Artificial Sequence: Synthetic peptide
GISYDGSTDYIDSVKG

SEQ ID NO: 2536 - protein, 16 aa, synthetic construct
  REGION 1..16: note = Description of Artificial Sequence: Synthetic peptide
GISTDGSTDYIDSVKG

SEQ ID NO: 2537 - protein, 16 aa, synthetic construct
  REGION 1..16: note = Description of Artificial Sequence: Synthetic peptide
GISADGSTAYIDSVKG

SEQ ID NO: 2538 - protein, 16 aa, synthetic construct
  REGION 1..16: note = Description of Artificial Sequence: Synthetic peptide
GISADGSTDYIESVKG

SEQ ID NO: 2539 - protein, 16 aa, synthetic construct
  REGION 1..16: note = Description of Artificial Sequence: Synthetic peptide
GISIDGSTDYIKSVKG

SEQ ID NO: 2540 - protein, 16 aa, synthetic construct
  REGION 1..16: note = Description of Artificial Sequence: Synthetic peptide
GISADGSKDYIDSVKG

SEQ ID NO: 2541 - protein, 16 aa, synthetic construct
  REGION 1..16: note = Description of Artificial Sequence: Synthetic peptide
GISADGSTVYIDSVKG

SEQ ID NO: 2542 - protein, 16 aa, synthetic construct
  REGION 1..16: note = Description of Artificial Sequence: Synthetic peptide
GISRDGSTDYIDSVKG

SEQ ID NO: 2543 - protein, 16 aa, synthetic construct
  REGION 1..16: note = Description of Artificial Sequence: Synthetic peptide
GISADGSTDYIHSVKG

SEQ ID NO: 2544 - protein, 16 aa, synthetic construct
  REGION 1..16: note = Description of Artificial Sequence: Synthetic peptide
GISADGSTIYIDSVKG

SEQ ID NO: 2545 - protein, 16 aa, synthetic construct
  REGION 1..16: note = Description of Artificial Sequence: Synthetic peptide
GISANGSTDYIDSVKG

SEQ ID NO: 2546 - protein, 16 aa, synthetic construct
  REGION 1..16: note = Description of Artificial Sequence: Synthetic peptide
GISTDGSTDYIDSVKG

SEQ ID NO: 2547 - protein, 16 aa, synthetic construct
  REGION 1..16: note = Description of Artificial Sequence: Synthetic peptide
GISYDGSTDYIDSVKG

SEQ ID NO: 2548 - protein, 16 aa, synthetic construct
  REGION 1..16: note = Description of Artificial Sequence: Synthetic peptide
GISADGSTDYIASVKG

SEQ ID NO: 2549 - protein, 16 aa, synthetic construct
  REGION 1..16: note = Description of Artificial Sequence: Synthetic peptide
GISADGSTDYIGSVKG

SEQ ID NO: 2550 - protein, 16 aa, synthetic construct
  REGION 1..16: note = Description of Artificial Sequence: Synthetic peptide
GISANGSTDYYDSVKG

SEQ ID NO: 2551 - protein, 16 aa, synthetic construct
  REGION 1..16: note = Description of Artificial Sequence: Synthetic peptide
GISADGSTSYIDSVKG

SEQ ID NO: 2552 - protein, 16 aa, synthetic construct
  REGION 1..16: note = Description of Artificial Sequence: Synthetic peptide
GVSADGSTDYIDSVKG

SEQ ID NO: 2553 - protein, 16 aa, synthetic construct
  REGION 1..16: note = Description of Artificial Sequence: Synthetic peptide
GISARGSTDYIDSVKG

SEQ ID NO: 2554 - protein, 16 aa, synthetic construct
  REGION 1..16: note = Description of Artificial Sequence: Synthetic peptide
GISADGSTIYIDSVKG

SEQ ID NO: 2555 - protein, 16 aa, synthetic construct
  REGION 1..16: note = Description of Artificial Sequence: Synthetic peptide
GISANGSTDYIDSVKG

SEQ ID NO: 2556 - protein, 16 aa, synthetic construct
  REGION 1..16: note = Description of Artificial Sequence: Synthetic peptide
GISADGSTDYVDSVKG

SEQ ID NO: 2557 - protein, 16 aa, synthetic construct
  REGION 1..16: note = Description of Artificial Sequence: Synthetic peptide
GISADGSTDYRDSVKG

SEQ ID NO: 2558 - protein, 16 aa, synthetic construct
  REGION 1..16: note = Description of Artificial Sequence: Synthetic peptide
GISVDGSTDYIDSVKG

SEQ ID NO: 2559 - protein, 16 aa, synthetic construct
  REGION 1..16: note = Description of Artificial Sequence: Synthetic peptide
GISADGSTDYILSVKG

SEQ ID NO: 2560 - protein, 16 aa, synthetic construct
  REGION 1..16: note = Description of Artificial Sequence: Synthetic peptide
GISVDGSTDYIDSVKG

SEQ ID NO: 2561 - protein, 16 aa, synthetic construct
  REGION 1..16: note = Description of Artificial Sequence: Synthetic peptide
GISSDGSKVFNESVKG

SEQ ID NO: 2562 - protein, 16 aa, synthetic construct
  REGION 1..16: note = Description of Artificial Sequence: Synthetic peptide
GISSDGSEVYTDSVKG

SEQ ID NO: 2563 - protein, 16 aa, synthetic construct
  REGION 1..16: note = Description of Artificial Sequence: Synthetic peptide
GISSDDSNVYYESVKG

SEQ ID NO: 2564 - protein, 16 aa, synthetic construct
  REGION 1..16: note = Description of Artificial Sequence: Synthetic peptide
GISSDGSKVYADSVKG

SEQ ID NO: 2565 - protein, 16 aa, synthetic construct
  REGION 1..16: note = Description of Artificial Sequence: Synthetic peptide
GISSDESTLYVDSVKG

SEQ ID NO: 2566 - protein, 16 aa, synthetic construct
  REGION 1..16: note = Description of Artificial Sequence: Synthetic peptide
GISSDDSKVYSDSVKG

SEQ ID NO: 2567 - protein, 16 aa, synthetic construct
  REGION 1..16: note = Description of Artificial Sequence: Synthetic peptide
GISSDGSQVYGASVKG

SEQ ID NO: 2568 - protein, 16 aa, synthetic construct
  REGION 1..16: note = Description of Artificial Sequence: Synthetic peptide
GISSDGSKVYADSVKG

SEQ ID NO: 2569 - protein, 16 aa, synthetic construct
  REGION 1..16: note = Description of Artificial Sequence: Synthetic peptide
GISSDGSNMYADSVKG

SEQ ID NO: 2570 - protein, 16 aa, synthetic construct
  REGION 1..16: note = Description of Artificial Sequence: Synthetic peptide
GISSDGSKVYTDSVKG

SEQ ID NO: 2571 - protein, 16 aa, synthetic construct
  REGION 1..16: note = Description of Artificial Sequence: Synthetic peptide
GISSDGSKVSAESVKG

SEQ ID NO: 2572 - protein, 16 aa, synthetic construct
  REGION 1..16: note = Description of Artificial Sequence: Synthetic peptide
GISSDGSKVYDDSVKG

SEQ ID NO: 2573 - protein, 16 aa, synthetic construct
  REGION 1..16: note = Description of Artificial Sequence: Synthetic peptide
GISSDGSKVYDDSVKG

SEQ ID NO: 2574 - protein, 16 aa, synthetic construct
  REGION 1..16: note = Description of Artificial Sequence: Synthetic peptide
GISSDGSAVYVGSVKG

SEQ ID NO: 2575 - protein, 16 aa, synthetic construct
  REGION 1..16: note = Description of Artificial Sequence: Synthetic peptide
GISSDGSYVYSESVKG

SEQ ID NO: 2576 - protein, 16 aa, synthetic construct
  REGION 1..16: note = Description of Artificial Sequence: Synthetic peptide
GISSDSSHVYADSVKG

SEQ ID NO: 2577 - protein, 16 aa, synthetic construct
  REGION 1..16: note = Description of Artificial Sequence: Synthetic peptide
GISSDSSIVYTDSVKG

SEQ ID NO: 2578 - protein, 16 aa, synthetic construct
  REGION 1..16: note = Description of Artificial Sequence: Synthetic peptide
GISSDGSEVNTDSVKG

SEQ ID NO: 2579 - protein, 16 aa, synthetic construct
  REGION 1..16: note = Description of Artificial Sequence: Synthetic peptide
GISSDGSKLSSDSVKG

SEQ ID NO: 2580 - protein, 16 aa, synthetic construct
  REGION 1..16: note = Description of Artificial Sequence: Synthetic peptide
GISSDNSKVYADSVKG

SEQ ID NO: 2581 - protein, 16 aa, synthetic construct
  REGION 1..16: note = Description of Artificial Sequence: Synthetic peptide
GISSDGSRVYFDSVKG

SEQ ID NO: 2582 - protein, 16 aa, synthetic construct
  REGION 1..16: note = Description of Artificial Sequence: Synthetic peptide
GISSDGSLVYAESVKG

SEQ ID NO: 2583 - protein, 16 aa, synthetic construct
  REGION 1..16: note = Description of Artificial Sequence: Synthetic peptide
GISSDGSVVYVDSVKG

SEQ ID NO: 2584 - protein, 16 aa, synthetic construct
  REGION 1..16: note = Description of Artificial Sequence: Synthetic peptide
GISSDGSKVYVDSVKG

SEQ ID NO: 2585 - protein, 16 aa, synthetic construct
  REGION 1..16: note = Description of Artificial Sequence: Synthetic peptide
GISSDGSKLYDESVKG

SEQ ID NO: 2586 - protein, 16 aa, synthetic construct
  REGION 1..16: note = Description of Artificial Sequence: Synthetic peptide
GISSDYSKLYADSVKG

SEQ ID NO: 2587 - protein, 16 aa, synthetic construct
  REGION 1..16: note = Description of Artificial Sequence: Synthetic peptide
GISSDSSKVYTESVKG

SEQ ID NO: 2588 - protein, 16 aa, synthetic construct
  REGION 1..16: note = Description of Artificial Sequence: Synthetic peptide
GISSDGSQVYVDSVKG

SEQ ID NO: 2589 - protein, 16 aa, synthetic construct
  REGION 1..16: note = Description of Artificial Sequence: Synthetic peptide
GISSDGSKVYSDSVKG

SEQ ID NO: 2590 - protein, 16 aa, synthetic construct
  REGION 1..16: note = Description of Artificial Sequence: Synthetic peptide
GISSDGSKVYVDSVKG

SEQ ID NO: 2591 - protein, 16 aa, synthetic construct
  REGION 1..16: note = Description of Artificial Sequence: Synthetic peptide
GISSDGSKVYADSVKG

SEQ ID NO: 2592 - protein, 16 aa, synthetic construct
  REGION 1..16: note = Description of Artificial Sequence: Synthetic peptide
GISSDGSSVYADSVKG

SEQ ID NO: 2593 - protein, 16 aa, synthetic construct
  REGION 1..16: note = Description of Artificial Sequence: Synthetic peptide
GISSDGSQVYYGSVKG

SEQ ID NO: 2594 - protein, 16 aa, synthetic construct
  REGION 1..16: note = Description of Artificial Sequence: Synthetic peptide
GISSDGSKVYTDSVKG

SEQ ID NO: 2595 - protein, 16 aa, synthetic construct
  REGION 1..16: note = Description of Artificial Sequence: Synthetic peptide
GISSDGSKVSADSVKG

SEQ ID NO: 2596 - protein, 16 aa, synthetic construct
  REGION 1..16: note = Description of Artificial Sequence: Synthetic peptide
GISSDGSKVYEDSVKG

SEQ ID NO: 2597 - protein, 16 aa, synthetic construct
  REGION 1..16: note = Description of Artificial Sequence: Synthetic peptide
GISSDRSKVYADSVKG

SEQ ID NO: 2598 - protein, 16 aa, synthetic construct
  REGION 1..16: note = Description of Artificial Sequence: Synthetic peptide
GISSDGSKVYAESVKG

SEQ ID NO: 2599 - protein, 16 aa, synthetic construct
  REGION 1..16: note = Description of Artificial Sequence: Synthetic peptide
GISSDGSVVTTESVKG

SEQ ID NO: 2600 - protein, 16 aa, synthetic construct
  REGION 1..16: note = Description of Artificial Sequence: Synthetic peptide
GISSDGSHVHQESVKG

SEQ ID NO: 2601 - protein, 16 aa, synthetic construct
  REGION 1..16: note = Description of Artificial Sequence: Synthetic peptide
GISADGSTVYVESVKG

SEQ ID NO: 2602 - protein, 16 aa, synthetic construct
  REGION 1..16: note = Description of Artificial Sequence: Synthetic peptide
GISSDGSTVYIDSVKG

SEQ ID NO: 2603 - protein, 16 aa, synthetic construct
  REGION 1..16: note = Description of Artificial Sequence: Synthetic peptide
GISVDGSTHYVASVKG

SEQ ID NO: 2604 - protein, 16 aa, synthetic construct
  REGION 1..16: note = Description of Artificial Sequence: Synthetic peptide
GISTDGSKHYIDSVKG

SEQ ID NO: 2605 - protein, 16 aa, synthetic construct
  REGION 1..16: note = Description of Artificial Sequence: Synthetic peptide
GISYDGSKYYAESVKG

SEQ ID NO: 2606 - protein, 16 aa, synthetic construct
  REGION 1..16: note = Description of Artificial Sequence: Synthetic peptide
GISANGSRTYMESVKG

SEQ ID NO: 2607 - protein, 16 aa, synthetic construct
  REGION 1..16: note = Description of Artificial Sequence: Synthetic peptide
GISPDGSTDYVDSVKG

SEQ ID NO: 2608 - protein, 16 aa, synthetic construct
  REGION 1..16: note = Description of Artificial Sequence: Synthetic peptide
GISPNGSAVYTESVKG

SEQ ID NO: 2609 - protein, 16 aa, synthetic construct
  REGION 1..16: note = Description of Artificial Sequence: Synthetic peptide
GISPDGSTAYMESVKG

SEQ ID NO: 2610 - protein, 16 aa, synthetic construct
  REGION 1..16: note = Description of Artificial Sequence: Synthetic peptide
GISNDGSTDYIDSVKG

SEQ ID NO: 2611 - protein, 16 aa, synthetic construct
  REGION 1..16: note = Description of Artificial Sequence: Synthetic peptide
GISTDGSAVYFDSVKG

SEQ ID NO: 2612 - protein, 16 aa, synthetic construct
  REGION 1..16: note = Description of Artificial Sequence: Synthetic peptide
GISTGGSTHYIESVKG

SEQ ID NO: 2613 - protein, 16 aa, synthetic construct
  REGION 1..16: note = Description of Artificial Sequence: Synthetic peptide
GISTDGSTVYIDSVKG

SEQ ID NO: 2614 - protein, 16 aa, synthetic construct
  REGION 1..16: note = Description of Artificial Sequence: Synthetic peptide
GISNEGSTYYMDSVKG

SEQ ID NO: 2615 - protein, 16 aa, synthetic construct
  REGION 1..16: note = Description of Artificial Sequence: Synthetic peptide
GISADGSHVYTNSVKG

SEQ ID NO: 2616 - protein, 16 aa, synthetic construct
  REGION 1..16: note = Description of Artificial Sequence: Synthetic peptide
GISDDGSRYYTDSVKG

SEQ ID NO: 2617 - protein, 16 aa, synthetic construct
  REGION 1..16: note = Description of Artificial Sequence: Synthetic peptide
GISAEGSTLYMESVKG

SEQ ID NO: 2618 - protein, 16 aa, synthetic construct
  REGION 1..16: note = Description of Artificial Sequence: Synthetic peptide
GISTDGSTVYIDSVKG

SEQ ID NO: 2619 - protein, 16 aa, synthetic construct
  REGION 1..16: note = Description of Artificial Sequence: Synthetic peptide
GISANGSTSYIDSVKG

SEQ ID NO: 2620 - protein, 16 aa, synthetic construct
  REGION 1..16: note = Description of Artificial Sequence: Synthetic peptide
GISDDGSRHYIESVKG

SEQ ID NO: 2621 - protein, 16 aa, synthetic construct
  REGION 1..16: note = Description of Artificial Sequence: Synthetic peptide
GISPDGSTVYIESVKG

SEQ ID NO: 2622 - protein, 16 aa, synthetic construct
  REGION 1..16: note = Description of Artificial Sequence: Synthetic peptide
GISDDGSTVYVDSVKG

SEQ ID NO: 2623 - protein, 16 aa, synthetic construct
  REGION 1..16: note = Description of Artificial Sequence: Synthetic peptide
GISDDGSTVYFDSVKG

SEQ ID NO: 2624 - protein, 16 aa, synthetic construct
  REGION 1..16: note = Description of Artificial Sequence: Synthetic peptide
GISDEGSTVYIGSVKG

SEQ ID NO: 2625 - protein, 16 aa, synthetic construct
  REGION 1..16: note = Description of Artificial Sequence: Synthetic peptide
GISDDGSIVYMDSVKG

SEQ ID NO: 2626 - protein, 16 aa, synthetic construct
  REGION 1..16: note = Description of Artificial Sequence: Synthetic peptide
GISDDGSKHYFDSVKG

SEQ ID NO: 2627 - protein, 16 aa, synthetic construct
  REGION 1..16: note = Description of Artificial Sequence: Synthetic peptide
GISTDGSTDYLHSVKG

SEQ ID NO: 2628 - protein, 16 aa, synthetic construct
  REGION 1..16: note = Description of Artificial Sequence: Synthetic peptide
GISDDGSKHYFDSVKG

SEQ ID NO: 2629 - protein, 16 aa, synthetic construct
  REGION 1..16: note = Description of Artificial Sequence: Synthetic peptide
GISYDGSTVYVESVKG

SEQ ID NO: 2630 - protein, 16 aa, synthetic construct
  REGION 1..16: note = Description of Artificial Sequence: Synthetic peptide
GISDDGSTVYIDSVKG

SEQ ID NO: 2631 - protein, 16 aa, synthetic construct
  REGION 1..16: note = Description of Artificial Sequence: Synthetic peptide
GISDDGSTVYVDSVKG

SEQ ID NO: 2632 - protein, 16 aa, synthetic construct
  REGION 1..16: note = Description of Artificial Sequence: Synthetic peptide
GISDDGSQVYIDSVKG

SEQ ID NO: 2633 - protein, 16 aa, synthetic construct
  REGION 1..16: note = Description of Artificial Sequence: Synthetic peptide
GISVDGSTVYSDSVKG

SEQ ID NO: 2634 - protein, 16 aa, synthetic construct
  REGION 1..16: note = Description of Artificial Sequence: Synthetic peptide
GISDDGSNVYIDSVKG

SEQ ID NO: 2635 - protein, 16 aa, synthetic construct
  REGION 1..16: note = Description of Artificial Sequence: Synthetic peptide
GISTDGSTVYFVSVKG

SEQ ID NO: 2636 - protein, 16 aa, synthetic construct
  REGION 1..16: note = Description of Artificial Sequence: Synthetic peptide
GISTDGSTVYIDSVKG

SEQ ID NO: 2637 - protein, 7 aa, synthetic construct
  REGION 1..7: note = Description of Artificial Sequence: Synthetic peptide
RYFERTD

SEQ ID NO: 2638 - protein, 7 aa, synthetic construct
  REGION 1..7: note = Description of Artificial Sequence: Synthetic peptide
RYFERTD

SEQ ID NO: 2639 - protein, 7 aa, synthetic construct
  REGION 1..7: note = Description of Artificial Sequence: Synthetic peptide
RYFERTD

SEQ ID NO: 2640 - protein, 7 aa, synthetic construct
  REGION 1..7: note = Description of Artificial Sequence: Synthetic peptide
YQGLYAY

SEQ ID NO: 2641 - protein, 7 aa, synthetic construct
  REGION 1..7: note = Description of Artificial Sequence: Synthetic peptide
RVFDHVY

SEQ ID NO: 2642 - protein, 7 aa, synthetic construct
  REGION 1..7: note = Description of Artificial Sequence: Synthetic peptide
RAFGRDY

SEQ ID NO: 2643 - protein, 7 aa, synthetic construct
  REGION 1..7: note = Description of Artificial Sequence: Synthetic peptide
RTMGRDY

SEQ ID NO: 2644 - protein, 8 aa, synthetic construct
  REGION 1..8: note = Description of Artificial Sequence: Synthetic peptide
WDGVGGAY

SEQ ID NO: 2645 - protein, 8 aa, synthetic construct
  REGION 1..8: note = Description of Artificial Sequence: Synthetic peptide
WDGVGGAY

SEQ ID NO: 2646 - protein, 8 aa, synthetic construct
  REGION 1..8: note = Description of Artificial Sequence: Synthetic peptide
WNGVGGAY

SEQ ID NO: 2647 - protein, 8 aa, synthetic construct
  REGION 1..8: note = Description of Artificial Sequence: Synthetic peptide
WDGVGGAY

SEQ ID NO: 2648 - protein, 8 aa, synthetic construct
  REGION 1..8: note = Description of Artificial Sequence: Synthetic peptide
WDGVGGAY

SEQ ID NO: 2649 - protein, 6 aa, synthetic construct
  REGION 1..6: note = Description of Artificial Sequence: Synthetic peptide
RSWNNY

SEQ ID NO: 2650 - protein, 6 aa, synthetic construct
  REGION 1..6: note = Description of Artificial Sequence: Synthetic peptide
RSWNNY

SEQ ID NO: 2651 - protein, 6 aa, synthetic construct
  REGION 1..6: note = Description of Artificial Sequence: Synthetic peptide
RSWNNY

SEQ ID NO: 2652 - protein, 9 aa, synthetic construct
  REGION 1..9: note = Description of Artificial Sequence: Synthetic peptide
ESFGRIWYN

SEQ ID NO: 2653 - protein, 7 aa, synthetic construct
  REGION 1..7: note = Description of Artificial Sequence: Synthetic peptide
QHFGTDS

SEQ ID NO: 2654 - protein, 7 aa, synthetic construct
  REGION 1..7: note = Description of Artificial Sequence: Synthetic peptide
QQFGTDS

SEQ ID NO: 2655 - protein, 9 aa, synthetic construct
  REGION 1..9: note = Description of Artificial Sequence: Synthetic peptide
YGIQRAEGY

SEQ ID NO: 2656 - protein, 9 aa, synthetic construct
  REGION 1..9: note = Description of Artificial Sequence: Synthetic peptide
YRWVGRDTY

SEQ ID NO: 2657 - protein, 9 aa, synthetic construct
  REGION 1..9: note = Description of Artificial Sequence: Synthetic peptide
YRWVGRDTY

SEQ ID NO: 2658 - protein, 9 aa, synthetic construct
  REGION 1..9: note = Description of Artificial Sequence: Synthetic peptide
YRWVGRDTY

SEQ ID NO: 2659 - protein, 9 aa, synthetic construct
  REGION 1..9: note = Description of Artificial Sequence: Synthetic peptide
YRWEGRDTY

SEQ ID NO: 2660 - protein, 9 aa, synthetic construct
  REGION 1..9: note = Description of Artificial Sequence: Synthetic peptide
YRWEGRNTY

SEQ ID NO: 2661 - protein, 9 aa, synthetic construct
  REGION 1..9: note = Description of Artificial Sequence: Synthetic peptide
YRWVGRYTY

SEQ ID NO: 2662 - protein, 9 aa, synthetic construct
  REGION 1..9: note = Description of Artificial Sequence: Synthetic peptide
YRWVGRDTY

SEQ ID NO: 2663 - protein, 9 aa, synthetic construct
  REGION 1..9: note = Description of Artificial Sequence: Synthetic peptide
YRWVGRDTY

SEQ ID NO: 2664 - protein, 9 aa, synthetic construct
  REGION 1..9: note = Description of Artificial Sequence: Synthetic peptide
YRWVGRDTY

SEQ ID NO: 2665 - protein, 9 aa, synthetic construct
  REGION 1..9: note = Description of Artificial Sequence: Synthetic peptide
YRWVDRYTY

SEQ ID NO: 2666 - protein, 9 aa, synthetic construct
  REGION 1..9: note = Description of Artificial Sequence: Synthetic peptide
YRWIDRYTY

SEQ ID NO: 2667 - protein, 9 aa, synthetic construct
  REGION 1..9: note = Description of Artificial Sequence: Synthetic peptide
YRWVDRYTY

SEQ ID NO: 2668 - protein, 9 aa, synthetic construct
  REGION 1..9: note = Description of Artificial Sequence: Synthetic peptide
YRWVGRDTY

SEQ ID NO: 2669 - protein, 9 aa, synthetic construct
  REGION 1..9: note = Description of Artificial Sequence: Synthetic peptide
YRWTTRYTY

SEQ ID NO: 2670 - protein, 9 aa, synthetic construct
  REGION 1..9: note = Description of Artificial Sequence: Synthetic peptide
YRWVGGYTY

SEQ ID NO: 2671 - protein, 11 aa, synthetic construct
  REGION 1..11: note = Description of Artificial Sequence: Synthetic peptide
FRTVAASSMQY

SEQ ID NO: 2672 - protein, 11 aa, synthetic construct
  REGION 1..11: note = Description of Artificial Sequence: Synthetic peptide
FRTVSGSSMRY

SEQ ID NO: 2673 - protein, 10 aa, synthetic construct
  REGION 1..10: note = Description of Artificial Sequence: Synthetic peptide
NRGFAGAPSY

SEQ ID NO: 2674 - protein, 6 aa, synthetic construct
  REGION 1..6: note = Description of Artificial Sequence: Synthetic peptide
YFQSSY

SEQ ID NO: 2675 - protein, 6 aa, synthetic construct
  REGION 1..6: note = Description of Artificial Sequence: Synthetic peptide
YFQSSY

SEQ ID NO: 2676 - protein, 6 aa, synthetic construct
  REGION 1..6: note = Description of Artificial Sequence: Synthetic peptide
YFQSSY

SEQ ID NO: 2677 - protein, 11 aa, synthetic construct
  REGION 1..11: note = Description of Artificial Sequence: Synthetic peptide
HWTQGSVPKES

SEQ ID NO: 2678 - protein, 7 aa, synthetic construct
  REGION 1..7: note = Description of Artificial Sequence: Synthetic peptide
RSYSSDY

SEQ ID NO: 2679 - protein, 7 aa, synthetic construct
  REGION 1..7: note = Description of Artificial Sequence: Synthetic peptide
RYGDINY

SEQ ID NO: 2680 - protein, 7 aa, synthetic construct
  REGION 1..7: note = Description of Artificial Sequence: Synthetic peptide
RYGDINY

SEQ ID NO: 2681 - protein, 6 aa, synthetic construct
  REGION 1..6: note = Description of Artificial Sequence: Synthetic peptide
YDSRSY

SEQ ID NO: 2682 - protein, 7 aa, synthetic construct
  REGION 1..7: note = Description of Artificial Sequence: Synthetic peptide
YDNINAY

SEQ ID NO: 2683 - protein, 7 aa, synthetic construct
  REGION 1..7: note = Description of Artificial Sequence: Synthetic peptide
YDNINAY

SEQ ID NO: 2684 - protein, 7 aa, synthetic construct
  REGION 1..7: note = Description of Artificial Sequence: Synthetic peptide
YDNINAY

SEQ ID NO: 2685 - protein, 7 aa, synthetic construct
  REGION 1..7: note = Description of Artificial Sequence: Synthetic peptide
YDNINAY

SEQ ID NO: 2686 - protein, 7 aa, synthetic construct
  REGION 1..7: note = Description of Artificial Sequence: Synthetic peptide
WIAGKAY

SEQ ID NO: 2687 - protein, 7 aa, synthetic construct
  REGION 1..7: note = Description of Artificial Sequence: Synthetic peptide
RSQLGST

SEQ ID NO: 2688 - protein, 8 aa, synthetic construct
  REGION 1..8: note = Description of Artificial Sequence: Synthetic peptide
YYLDTYAY

SEQ ID NO: 2689 - protein, 7 aa, synthetic construct
  REGION 1..7: note = Description of Artificial Sequence: Synthetic peptide
RYFERTD

SEQ ID NO: 2690 - protein, 6 aa, synthetic construct
  REGION 1..6: note = Description of Artificial Sequence: Synthetic peptide
YFQSSY

SEQ ID NO: 2691 - protein, 9 aa, synthetic construct
  REGION 1..9: note = Description of Artificial Sequence: Synthetic peptide
YRWVGRDTY

SEQ ID NO: 2692 - protein, 7 aa, synthetic construct
  REGION 1..7: note = Description of Artificial Sequence: Synthetic peptide
WIAGKAY

SEQ ID NO: 2693 - protein, 8 aa, synthetic construct
  REGION 1..8: note = Description of Artificial Sequence: Synthetic peptide
WNGVGGAY

SEQ ID NO: 2694 - protein, 8 aa, synthetic construct
  REGION 1..8: note = Description of Artificial Sequence: Synthetic peptide
WDGVGGAY

SEQ ID NO: 2695 - protein, 7 aa, synthetic construct
  REGION 1..7: note = Description of Artificial Sequence: Synthetic peptide
RAFGRDY

SEQ ID NO: 2696 - protein, 11 aa, synthetic construct
  REGION 1..11: note = Description of Artificial Sequence: Synthetic peptide
FRTVAASSMQY

SEQ ID NO: 2697 - protein, 6 aa, synthetic construct
  REGION 1..6: note = Description of Artificial Sequence: Synthetic peptide
RSWNNY

SEQ ID NO: 2698 - protein, 6 aa, synthetic construct
  REGION 1..6: note = Description of Artificial Sequence: Synthetic peptide
YFQSSY

SEQ ID NO: 2699 - protein, 7 aa, synthetic construct
  REGION 1..7: note = Description of Artificial Sequence: Synthetic peptide
QHFGTDS

SEQ ID NO: 2700 - protein, 7 aa, synthetic construct
  REGION 1..7: note = Description of Artificial Sequence: Synthetic peptide
RSQLGST

SEQ ID NO: 2701 - protein, 7 aa, synthetic construct
  REGION 1..7: note = Description of Artificial Sequence: Synthetic peptide
YQGLYAY

SEQ ID NO: 2702 - protein, 7 aa, synthetic construct
  REGION 1..7: note = Description of Artificial Sequence: Synthetic peptide
YDNINAY

SEQ ID NO: 2703 - protein, 11 aa, synthetic construct
  REGION 1..11: note = Description of Artificial Sequence: Synthetic peptide
HWTQGSVPKES

SEQ ID NO: 2704 - protein, 11 aa, synthetic construct
  REGION 1..11: note = Description of Artificial Sequence: Synthetic peptide
FRTVSGSSMRY

SEQ ID NO: 2705 - protein, 7 aa, synthetic construct
  REGION 1..7: note = Description of Artificial Sequence: Synthetic peptide
RSYSSDY

SEQ ID NO: 2706 - protein, 6 aa, synthetic construct
  REGION 1..6: note = Description of Artificial Sequence: Synthetic peptide
RSWNNY

SEQ ID NO: 2707 - protein, 7 aa, synthetic construct
  REGION 1..7: note = Description of Artificial Sequence: Synthetic peptide
QQFGTDS

SEQ ID NO: 2708 - protein, 9 aa, synthetic construct
  REGION 1..9: note = Description of Artificial Sequence: Synthetic peptide
YGIQRAEGY

SEQ ID NO: 2709 - protein, 9 aa, synthetic construct
  REGION 1..9: note = Description of Artificial Sequence: Synthetic peptide
YRWVGRYTY

SEQ ID NO: 2710 - protein, 7 aa, synthetic construct
  REGION 1..7: note = Description of Artificial Sequence: Synthetic peptide
RYGDINY

SEQ ID NO: 2711 - protein, 9 aa, synthetic construct
  REGION 1..9: note = Description of Artificial Sequence: Synthetic peptide
YRWTTRYTY

SEQ ID NO: 2712 - protein, 8 aa, synthetic construct
  REGION 1..8: note = Description of Artificial Sequence: Synthetic peptide
YYLDTYAY

SEQ ID NO: 2713 - protein, 9 aa, synthetic construct
  REGION 1..9: note = Description of Artificial Sequence: Synthetic peptide
YRWEGRNTY

SEQ ID NO: 2714 - protein, 9 aa, synthetic construct
  REGION 1..9: note = Description of Artificial Sequence: Synthetic peptide
ESFGRIWYN

SEQ ID NO: 2715 - protein, 7 aa, synthetic construct
  REGION 1..7: note = Description of Artificial Sequence: Synthetic peptide
RYGDINY

SEQ ID NO: 2716 - protein, 7 aa, synthetic construct
  REGION 1..7: note = Description of Artificial Sequence: Synthetic peptide
RVFDHVY

SEQ ID NO: 2717 - protein, 6 aa, synthetic construct
  REGION 1..6: note = Description of Artificial Sequence: Synthetic peptide
YFQSSY

SEQ ID NO: 2718 - protein, 8 aa, synthetic construct
  REGION 1..8: note = Description of Artificial Sequence: Synthetic peptide
WDGVGGAY

SEQ ID NO: 2719 - protein, 9 aa, synthetic construct
  REGION 1..9: note = Description of Artificial Sequence: Synthetic peptide
YRWVGGYTY

SEQ ID NO: 2720 - protein, 6 aa, synthetic construct
  REGION 1..6: note = Description of Artificial Sequence: Synthetic peptide
YDSRSY

SEQ ID NO: 2721 - protein, 10 aa, synthetic construct
  REGION 1..10: note = Description of Artificial Sequence: Synthetic peptide
NRGFAGAPSY

SEQ ID NO: 2722 - protein, 7 aa, synthetic construct
  REGION 1..7: note = Description of Artificial Sequence: Synthetic peptide
RTMGRDY

SEQ ID NO: 2723 - protein, 11 aa, synthetic construct
  REGION 1..11: note = Description of Artificial Sequence: Synthetic peptide
FRHVSGSSMRY

SEQ ID NO: 2724 - protein, 11 aa, synthetic construct
  REGION 1..11: note = Description of Artificial Sequence: Synthetic peptide
FRTVSGSSSRY

SEQ ID NO: 2725 - protein, 11 aa, synthetic construct
  REGION 1..11: note = Description of Artificial Sequence: Synthetic peptide
FRTVSGSSMRY

SEQ ID NO: 2726 - protein, 11 aa, synthetic construct
  REGION 1..11: note = Description of Artificial Sequence: Synthetic peptide
FRTVRGSSMSY

SEQ ID NO: 2727 - protein, 11 aa, synthetic construct
  REGION 1..11: note = Description of Artificial Sequence: Synthetic peptide
FRTVSGSSKRY

SEQ ID NO: 2728 - protein, 11 aa, synthetic construct
  REGION 1..11: note = Description of Artificial Sequence: Synthetic peptide
FRMVSGSSMRY

SEQ ID NO: 2729 - protein, 11 aa, synthetic construct
  REGION 1..11: note = Description of Artificial Sequence: Synthetic peptide
FRTVQGSSMRY

SEQ ID NO: 2730 - protein, 11 aa, synthetic construct
  REGION 1..11: note = Description of Artificial Sequence: Synthetic peptide
FRTVYGSSMRY

SEQ ID NO: 2731 - protein, 11 aa, synthetic construct
  REGION 1..11: note = Description of Artificial Sequence: Synthetic peptide
FRTVSGSSYRY

SEQ ID NO: 2732 - protein, 11 aa, synthetic construct
  REGION 1..11: note = Description of Artificial Sequence: Synthetic peptide
FRTVLGSSMRY

SEQ ID NO: 2733 - protein, 11 aa, synthetic construct
  REGION 1..11: note = Description of Artificial Sequence: Synthetic peptide
FRRVSGSSMRY

SEQ ID NO: 2734 - protein, 11 aa, synthetic construct
  REGION 1..11: note = Description of Artificial Sequence: Synthetic peptide
FRTVSGSSMRY

SEQ ID NO: 2735 - protein, 11 aa, synthetic construct
  REGION 1..11: note = Description of Artificial Sequence: Synthetic peptide
FRTVSGSSARY

SEQ ID NO: 2736 - protein, 11 aa, synthetic construct
  REGION 1..11: note = Description of Artificial Sequence: Synthetic peptide
FRIVRGSSMRY

SEQ ID NO: 2737 - protein, 11 aa, synthetic construct
  REGION 1..11: note = Description of Artificial Sequence: Synthetic peptide
YRTVSGSSMRY

SEQ ID NO: 2738 - protein, 11 aa, synthetic construct
  REGION 1..11: note = Description of Artificial Sequence: Synthetic peptide
FRHVSGSSMRY

SEQ ID NO: 2739 - protein, 11 aa, synthetic construct
  REGION 1..11: note = Description of Artificial Sequence: Synthetic peptide
FRFVSGSSMRY

SEQ ID NO: 2740 - protein, 11 aa, synthetic construct
  REGION 1..11: note = Description of Artificial Sequence: Synthetic peptide
FRTVSGSSMRY

SEQ ID NO: 2741 - protein, 11 aa, synthetic construct
  REGION 1..11: note = Description of Artificial Sequence: Synthetic peptide
FRTKSGSSMRY

SEQ ID NO: 2742 - protein, 11 aa, synthetic construct
  REGION 1..11: note = Description of Artificial Sequence: Synthetic peptide
FRTVYGSSMRY

SEQ ID NO: 2743 - protein, 11 aa, synthetic construct
  REGION 1..11: note = Description of Artificial Sequence: Synthetic peptide
FRTVSGSSMGY

SEQ ID NO: 2744 - protein, 11 aa, synthetic construct
  REGION 1..11: note = Description of Artificial Sequence: Synthetic peptide
FRTVSGSSMRS

SEQ ID NO: 2745 - protein, 11 aa, synthetic construct
  REGION 1..11: note = Description of Artificial Sequence: Synthetic peptide
FRTVGGSSMRY

SEQ ID NO: 2746 - protein, 11 aa, synthetic construct
  REGION 1..11: note = Description of Artificial Sequence: Synthetic peptide
FRTVSGSSMRY

SEQ ID NO: 2747 - protein, 11 aa, synthetic construct
  REGION 1..11: note = Description of Artificial Sequence: Synthetic peptide
FRTVSGSHMRY

SEQ ID NO: 2748 - protein, 11 aa, synthetic construct
  REGION 1..11: note = Description of Artificial Sequence: Synthetic peptide
FRAVSGSSMRY

SEQ ID NO: 2749 - protein, 11 aa, synthetic construct
  REGION 1..11: note = Description of Artificial Sequence: Synthetic peptide
FRTVSGSSMRY

SEQ ID NO: 2750 - protein, 11 aa, synthetic construct
  REGION 1..11: note = Description of Artificial Sequence: Synthetic peptide
FRTVSGSPMRY

SEQ ID NO: 2751 - protein, 11 aa, synthetic construct
  REGION 1..11: note = Description of Artificial Sequence: Synthetic peptide
FRTVSGSSMSY

SEQ ID NO: 2752 - protein, 11 aa, synthetic construct
  REGION 1..11: note = Description of Artificial Sequence: Synthetic peptide
FRTVSGSSMRY

SEQ ID NO: 2753 - protein, 11 aa, synthetic construct
  REGION 1..11: note = Description of Artificial Sequence: Synthetic peptide
FRTVRGSSMRY

SEQ ID NO: 2754 - protein, 11 aa, synthetic construct
  REGION 1..11: note = Description of Artificial Sequence: Synthetic peptide
FRTVRGSSMRY

SEQ ID NO: 2755 - protein, 11 aa, synthetic construct
  REGION 1..11: note = Description of Artificial Sequence: Synthetic peptide
FRQVSGSSMRY

SEQ ID NO: 2756 - protein, 11 aa, synthetic construct
  REGION 1..11: note = Description of Artificial Sequence: Synthetic peptide
FRIVSGSSMGY

SEQ ID NO: 2757 - protein, 11 aa, synthetic construct
  REGION 1..11: note = Description of Artificial Sequence: Synthetic peptide
FRTVSGASMRY

SEQ ID NO: 2758 - protein, 11 aa, synthetic construct
  REGION 1..11: note = Description of Artificial Sequence: Synthetic peptide
FRTVHGSSMRY

SEQ ID NO: 2759 - protein, 11 aa, synthetic construct
  REGION 1..11: note = Description of Artificial Sequence: Synthetic peptide
FRMVSGSSMRY

SEQ ID NO: 2760 - protein, 11 aa, synthetic construct
  REGION 1..11: note = Description of Artificial Sequence: Synthetic peptide
FRTISGSSMRY

SEQ ID NO: 2761 - protein, 11 aa, synthetic construct
  REGION 1..11: note = Description of Artificial Sequence: Synthetic peptide
FRTRSGSSMRY

SEQ ID NO: 2762 - protein, 11 aa, synthetic construct
  REGION 1..11: note = Description of Artificial Sequence: Synthetic peptide
FRTVSGHSMRY

SEQ ID NO: 2763 - protein, 11 aa, synthetic construct
  REGION 1..11: note = Description of Artificial Sequence: Synthetic peptide
FRTVSGGSMRY

SEQ ID NO: 2764 - protein, 11 aa, synthetic construct
  REGION 1..11: note = Description of Artificial Sequence: Synthetic peptide
FRTKSGSSMRY

SEQ ID NO: 2765 - protein, 11 aa, synthetic construct
  REGION 1..11: note = Description of Artificial Sequence: Synthetic peptide
FRTASGTSMRY

SEQ ID NO: 2766 - protein, 11 aa, synthetic construct
  REGION 1..11: note = Description of Artificial Sequence: Synthetic peptide
FNTVSGSSMRY

SEQ ID NO: 2767 - protein, 11 aa, synthetic construct
  REGION 1..11: note = Description of Artificial Sequence: Synthetic peptide
FRTVRGSSQRY

SEQ ID NO: 2768 - protein, 11 aa, synthetic construct
  REGION 1..11: note = Description of Artificial Sequence: Synthetic peptide
FRTVLGSSMRY

SEQ ID NO: 2769 - protein, 11 aa, synthetic construct
  REGION 1..11: note = Description of Artificial Sequence: Synthetic peptide
FRTRSGSSMRY

SEQ ID NO: 2770 - protein, 11 aa, synthetic construct
  REGION 1..11: note = Description of Artificial Sequence: Synthetic peptide
FRTVSGLSMRY

SEQ ID NO: 2771 - protein, 11 aa, synthetic construct
  REGION 1..11: note = Description of Artificial Sequence: Synthetic peptide
FRTVRGSSQRY

SEQ ID NO: 2772 - protein, 11 aa, synthetic construct
  REGION 1..11: note = Description of Artificial Sequence: Synthetic peptide
FRTVSGSSMVY

SEQ ID NO: 2773 - protein, 11 aa, synthetic construct
  REGION 1..11: note = Description of Artificial Sequence: Synthetic peptide
FRTVSRSSMRY

SEQ ID NO: 2774 - protein, 11 aa, synthetic construct
  REGION 1..11: note = Description of Artificial Sequence: Synthetic peptide
FRTVSGSSMSY

SEQ ID NO: 2775 - protein, 11 aa, synthetic construct
  REGION 1..11: note = Description of Artificial Sequence: Synthetic peptide
FRTVSGSSARY

SEQ ID NO: 2776 - protein, 11 aa, synthetic construct
  REGION 1..11: note = Description of Artificial Sequence: Synthetic peptide
FHTVSGSSMRY

SEQ ID NO: 2777 - protein, 11 aa, synthetic construct
  REGION 1..11: note = Description of Artificial Sequence: Synthetic peptide
FRTVLGSSMRY

SEQ ID NO: 2778 - protein, 11 aa, synthetic construct
  REGION 1..11: note = Description of Artificial Sequence: Synthetic peptide
FRTVSGSSMRY

SEQ ID NO: 2779 - protein, 11 aa, synthetic construct
  REGION 1..11: note = Description of Artificial Sequence: Synthetic peptide
FRNVSGSSMRY

SEQ ID NO: 2780 - protein, 11 aa, synthetic construct
  REGION 1..11: note = Description of Artificial Sequence: Synthetic peptide
FRTVTGSSMRY

SEQ ID NO: 2781 - protein, 11 aa, synthetic construct
  REGION 1..11: note = Description of Artificial Sequence: Synthetic peptide
FRTVSGSSMRY

SEQ ID NO: 2782 - protein, 11 aa, synthetic construct
  REGION 1..11: note = Description of Artificial Sequence: Synthetic peptide
FRTVKGSSMRY

SEQ ID NO: 2783 - protein, 11 aa, synthetic construct
  REGION 1..11: note = Description of Artificial Sequence: Synthetic peptide
FRTNSGSSMRY

SEQ ID NO: 2784 - protein, 11 aa, synthetic construct
  REGION 1..11: note = Description of Artificial Sequence: Synthetic peptide
FRTVSGASMRY

SEQ ID NO: 2785 - protein, 11 aa, synthetic construct
  REGION 1..11: note = Description of Artificial Sequence: Synthetic peptide
FRTVNLSSMRY

SEQ ID NO: 2786 - protein, 11 aa, synthetic construct
  REGION 1..11: note = Description of Artificial Sequence: Synthetic peptide
FRTVTGSSMRY

SEQ ID NO: 2787 - protein, 11 aa, synthetic construct
  REGION 1..11: note = Description of Artificial Sequence: Synthetic peptide
FRKVSGSSARY

SEQ ID NO: 2788 - protein, 11 aa, synthetic construct
  REGION 1..11: note = Description of Artificial Sequence: Synthetic peptide
FRTYSGSSMRY

SEQ ID NO: 2789 - protein, 11 aa, synthetic construct
  REGION 1..11: note = Description of Artificial Sequence: Synthetic peptide
FRTVSKSSMRY

SEQ ID NO: 2790 - protein, 11 aa, synthetic construct
  REGION 1..11: note = Description of Artificial Sequence: Synthetic peptide
FKTVSGSSMRY

SEQ ID NO: 2791 - protein, 11 aa, synthetic construct
  REGION 1..11: note = Description of Artificial Sequence: Synthetic peptide
FRTRSGSSMRY

SEQ ID NO: 2792 - protein, 11 aa, synthetic construct
  REGION 1..11: note = Description of Artificial Sequence: Synthetic peptide
FRTSSGSSMRY

SEQ ID NO: 2793 - protein, 11 aa, synthetic construct
  REGION 1..11: note = Description of Artificial Sequence: Synthetic peptide
FRFLSGSSMRY

SEQ ID NO: 2794 - protein, 11 aa, synthetic construct
  REGION 1..11: note = Description of Artificial Sequence: Synthetic peptide
FRTVSGSSMRY

SEQ ID NO: 2795 - protein, 11 aa, synthetic construct
  REGION 1..11: note = Description of Artificial Sequence: Synthetic peptide
FRLVSGSSMRY

SEQ ID NO: 2796 - protein, 11 aa, synthetic construct
  REGION 1..11: note = Description of Artificial Sequence: Synthetic peptide
FRTVSGSSMRF

SEQ ID NO: 2797 - protein, 11 aa, synthetic construct
  REGION 1..11: note = Description of Artificial Sequence: Synthetic peptide
FRTQSGSSMRY

SEQ ID NO: 2798 - protein, 11 aa, synthetic construct
  REGION 1..11: note = Description of Artificial Sequence: Synthetic peptide
FRTVSGSSMPY

SEQ ID NO: 2799 - protein, 11 aa, synthetic construct
  REGION 1..11: note = Description of Artificial Sequence: Synthetic peptide
FRTLSGSSMRY

SEQ ID NO: 2800 - protein, 11 aa, synthetic construct
  REGION 1..11: note = Description of Artificial Sequence: Synthetic peptide
FRTVSGSAMRY

SEQ ID NO: 2801 - protein, 11 aa, synthetic construct
  REGION 1..11: note = Description of Artificial Sequence: Synthetic peptide
FRTTSGSSMRY

SEQ ID NO: 2802 - protein, 11 aa, synthetic construct
  REGION 1..11: note = Description of Artificial Sequence: Synthetic peptide
FRTVSGTSMRY

SEQ ID NO: 2803 - protein, 11 aa, synthetic construct
  REGION 1..11: note = Description of Artificial Sequence: Synthetic peptide
FRTRSGSSMRY

SEQ ID NO: 2804 - protein, 11 aa, synthetic construct
  REGION 1..11: note = Description of Artificial Sequence: Synthetic peptide
FRTSSGSSMRY

SEQ ID NO: 2805 - protein, 11 aa, synthetic construct
  REGION 1..11: note = Description of Artificial Sequence: Synthetic peptide
FRTVSGSSMSY

SEQ ID NO: 2806 - protein, 11 aa, synthetic construct
  REGION 1..11: note = Description of Artificial Sequence: Synthetic peptide
FRPVSGSSMRY

SEQ ID NO: 2807 - protein, 11 aa, synthetic construct
  REGION 1..11: note = Description of Artificial Sequence: Synthetic peptide
FRHVSGSSMRY

SEQ ID NO: 2808 - protein, 11 aa, synthetic construct
  REGION 1..11: note = Description of Artificial Sequence: Synthetic peptide
FRTKSGSSMRY

SEQ ID NO: 2809 - protein, 11 aa, synthetic construct
  REGION 1..11: note = Description of Artificial Sequence: Synthetic peptide
FTTVSGSSMRY

SEQ ID NO: 2810 - protein, 11 aa, synthetic construct
  REGION 1..11: note = Description of Artificial Sequence: Synthetic peptide
FHTVSGSSMRY

SEQ ID NO: 2811 - protein, 11 aa, synthetic construct
  REGION 1..11: note = Description of Artificial Sequence: Synthetic peptide
FRTVRGSSMRY

SEQ ID NO: 2812 - protein, 11 aa, synthetic construct
  REGION 1..11: note = Description of Artificial Sequence: Synthetic peptide
FRTVLGSSMRY

SEQ ID NO: 2813 - protein, 11 aa, synthetic construct
  REGION 1..11: note = Description of Artificial Sequence: Synthetic peptide
FRTVSGSSMRS

SEQ ID NO: 2814 - protein, 11 aa, synthetic construct
  REGION 1..11: note = Description of Artificial Sequence: Synthetic peptide
FRTVRGSSMRY

SEQ ID NO: 2815 - protein, 11 aa, synthetic construct
  REGION 1..11: note = Description of Artificial Sequence: Synthetic peptide
FRYVSGSSMRY

SEQ ID NO: 2816 - protein, 11 aa, synthetic construct
  REGION 1..11: note = Description of Artificial Sequence: Synthetic peptide
FRTVYGSSMRY

SEQ ID NO: 2817 - protein, 11 aa, synthetic construct
  REGION 1..11: note = Description of Artificial Sequence: Synthetic peptide
FRTVLGSSMRY

SEQ ID NO: 2818 - protein, 11 aa, synthetic construct
  REGION 1..11: note = Description of Artificial Sequence: Synthetic peptide
YRTVSGSSMRY

SEQ ID NO: 2819 - protein, 11 aa, synthetic construct
  REGION 1..11: note = Description of Artificial Sequence: Synthetic peptide
FRSVSGSSMRY

SEQ ID NO: 2820 - protein, 11 aa, synthetic construct
  REGION 1..11: note = Description of Artificial Sequence: Synthetic peptide
FRRVSGSSMRY

SEQ ID NO: 2821 - protein, 11 aa, synthetic construct
  REGION 1..11: note = Description of Artificial Sequence: Synthetic peptide
FRTVSGTSMRY

SEQ ID NO: 2822 - protein, 11 aa, synthetic construct
  REGION 1..11: note = Description of Artificial Sequence: Synthetic peptide
FRTVAGSSMRY

SEQ ID NO: 2823 - protein, 11 aa, synthetic construct
  REGION 1..11: note = Description of Artificial Sequence: Synthetic peptide
FRIVSGSSMRY

SEQ ID NO: 2824 - protein, 11 aa, synthetic construct
  REGION 1..11: note = Description of Artificial Sequence: Synthetic peptide
FRTVSGVSMRY

SEQ ID NO: 2825 - protein, 11 aa, synthetic construct
  REGION 1..11: note = Description of Artificial Sequence: Synthetic peptide
FRTVQGSSMRY

SEQ ID NO: 2826 - protein, 11 aa, synthetic construct
  REGION 1..11: note = Description of Artificial Sequence: Synthetic peptide
FRTASGSSMRY

SEQ ID NO: 2827 - protein, 11 aa, synthetic construct
  REGION 1..11: note = Description of Artificial Sequence: Synthetic peptide
FRTVSGSSSRY

SEQ ID NO: 2828 - protein, 11 aa, synthetic construct
  REGION 1..11: note = Description of Artificial Sequence: Synthetic peptide
FRTVQGSSMRY

SEQ ID NO: 2829 - protein, 11 aa, synthetic construct
  REGION 1..11: note = Description of Artificial Sequence: Synthetic peptide
FRTVRGSSMRY

SEQ ID NO: 2830 - protein, 11 aa, synthetic construct
  REGION 1..11: note = Description of Artificial Sequence: Synthetic peptide
FRTKSGSSMRY

SEQ ID NO: 2831 - protein, 11 aa, synthetic construct
  REGION 1..11: note = Description of Artificial Sequence: Synthetic peptide
FRTVWGSSMRY

SEQ ID NO: 2832 - protein, 11 aa, synthetic construct
  REGION 1..11: note = Description of Artificial Sequence: Synthetic peptide
FRTRSGSSMRY

SEQ ID NO: 2833 - protein, 11 aa, synthetic construct
  REGION 1..11: note = Description of Artificial Sequence: Synthetic peptide
FHTVCGTSMGY

SEQ ID NO: 2834 - protein, 11 aa, synthetic construct
  REGION 1..11: note = Description of Artificial Sequence: Synthetic peptide
FRTVSGSSQRY

SEQ ID NO: 2835 - protein, 11 aa, synthetic construct
  REGION 1..11: note = Description of Artificial Sequence: Synthetic peptide
FRTVSGSSMSY

SEQ ID NO: 2836 - protein, 11 aa, synthetic construct
  REGION 1..11: note = Description of Artificial Sequence: Synthetic peptide
FRTVRGSSMRY

SEQ ID NO: 2837 - protein, 11 aa, synthetic construct
  REGION 1..11: note = Description of Artificial Sequence: Synthetic peptide
FRTQSGSSMRY

SEQ ID NO: 2838 - protein, 11 aa, synthetic construct
  REGION 1..11: note = Description of Artificial Sequence: Synthetic peptide
FRTLSGSSMRY

SEQ ID NO: 2839 - protein, 11 aa, synthetic construct
  REGION 1..11: note = Description of Artificial Sequence: Synthetic peptide
FHTVSGSSMRY

SEQ ID NO: 2840 - protein, 11 aa, synthetic construct
  REGION 1..11: note = Description of Artificial Sequence: Synthetic peptide
FRRVSGSSMRY

SEQ ID NO: 2841 - protein, 11 aa, synthetic construct
  REGION 1..11: note = Description of Artificial Sequence: Synthetic peptide
FRLVSGSSMRY

SEQ ID NO: 2842 - protein, 11 aa, synthetic construct
  REGION 1..11: note = Description of Artificial Sequence: Synthetic peptide
FRTVSGSYMRY

SEQ ID NO: 2843 - protein, 11 aa, synthetic construct
  REGION 1..11: note = Description of Artificial Sequence: Synthetic peptide
FRTVGGSSMRY

SEQ ID NO: 2844 - protein, 11 aa, synthetic construct
  REGION 1..11: note = Description of Artificial Sequence: Synthetic peptide
FRTHSGSSMRY

SEQ ID NO: 2845 - protein, 11 aa, synthetic construct
  REGION 1..11: note = Description of Artificial Sequence: Synthetic peptide
FRTVSTSSMRY

SEQ ID NO: 2846 - protein, 11 aa, synthetic construct
  REGION 1..11: note = Description of Artificial Sequence: Synthetic peptide
FRTVLGTSMRY

SEQ ID NO: 2847 - protein, 11 aa, synthetic construct
  REGION 1..11: note = Description of Artificial Sequence: Synthetic peptide
FRTVSGSSMRY

SEQ ID NO: 2848 - protein, 11 aa, synthetic construct
  REGION 1..11: note = Description of Artificial Sequence: Synthetic peptide
FRTVSGSSMGY

SEQ ID NO: 2849 - protein, 11 aa, synthetic construct
  REGION 1..11: note = Description of Artificial Sequence: Synthetic peptide
FRTVSGSSMRA

SEQ ID NO: 2850 - protein, 11 aa, synthetic construct
  REGION 1..11: note = Description of Artificial Sequence: Synthetic peptide
FRILSGSSMRY

SEQ ID NO: 2851 - protein, 11 aa, synthetic construct
  REGION 1..11: note = Description of Artificial Sequence: Synthetic peptide
FRTVQGSSMRY

SEQ ID NO: 2852 - protein, 11 aa, synthetic construct
  REGION 1..11: note = Description of Artificial Sequence: Synthetic peptide
FRTVSGQSMGY

SEQ ID NO: 2853 - protein, 11 aa, synthetic construct
  REGION 1..11: note = Description of Artificial Sequence: Synthetic peptide
FRTVSGSSARY

SEQ ID NO: 2854 - protein, 11 aa, synthetic construct
  REGION 1..11: note = Description of Artificial Sequence: Synthetic peptide
FRYVSGSSMRY

SEQ ID NO: 2855 - protein, 11 aa, synthetic construct
  REGION 1..11: note = Description of Artificial Sequence: Synthetic peptide
FRTVSGSSMRY

SEQ ID NO: 2856 - protein, 11 aa, synthetic construct
  REGION 1..11: note = Description of Artificial Sequence: Synthetic peptide
FRRVSGSSMRY

SEQ ID NO: 2857 - protein, 11 aa, synthetic construct
  REGION 1..11: note = Description of Artificial Sequence: Synthetic peptide
FHTVSGSSMRY

SEQ ID NO: 2858 - protein, 11 aa, synthetic construct
  REGION 1..11: note = Description of Artificial Sequence: Synthetic peptide
FRQVSGSSMRY

SEQ ID NO: 2859 - protein, 11 aa, synthetic construct
  REGION 1..11: note = Description of Artificial Sequence: Synthetic peptide
FRTVSGSYMRY

SEQ ID NO: 2860 - protein, 11 aa, synthetic construct
  REGION 1..11: note = Description of Artificial Sequence: Synthetic peptide
FRTASGSSMRY

SEQ ID NO: 2861 - protein, 11 aa, synthetic construct
  REGION 1..11: note = Description of Artificial Sequence: Synthetic peptide
FRTVSGHSMRY

SEQ ID NO: 2862 - protein, 11 aa, synthetic construct
  REGION 1..11: note = Description of Artificial Sequence: Synthetic peptide
FRTVSGSSSRY

SEQ ID NO: 2863 - protein, 11 aa, synthetic construct
  REGION 1..11: note = Description of Artificial Sequence: Synthetic peptide
FRTVSGSSYSY

SEQ ID NO: 2864 - protein, 11 aa, synthetic construct
  REGION 1..11: note = Description of Artificial Sequence: Synthetic peptide
FRTVSGSSQSY

SEQ ID NO: 2865 - protein, 9 aa, synthetic construct
  REGION 1..9: note = Description of Artificial Sequence: Synthetic peptide
YRWTRRYTY

SEQ ID NO: 2866 - protein, 9 aa, synthetic construct
  REGION 1..9: note = Description of Artificial Sequence: Synthetic peptide
YRWRTRYTY

SEQ ID NO: 2867 - protein, 9 aa, synthetic construct
  REGION 1..9: note = Description of Artificial Sequence: Synthetic peptide
YRWTTRRTY

SEQ ID NO: 2868 - protein, 9 aa, synthetic construct
  REGION 1..9: note = Description of Artificial Sequence: Synthetic peptide
YRWTTRYIY

SEQ ID NO: 2869 - protein, 9 aa, synthetic construct
  REGION 1..9: note = Description of Artificial Sequence: Synthetic peptide
YRWRTRYTY

SEQ ID NO: 2870 - protein, 9 aa, synthetic construct
  REGION 1..9: note = Description of Artificial Sequence: Synthetic peptide
YRWTRRYTY

SEQ ID NO: 2871 - protein, 9 aa, synthetic construct
  REGION 1..9: note = Description of Artificial Sequence: Synthetic peptide
YRWRTRYTY

SEQ ID NO: 2872 - protein, 9 aa, synthetic construct
  REGION 1..9: note = Description of Artificial Sequence: Synthetic peptide
YRWTTRYIY

SEQ ID NO: 2873 - protein, 9 aa, synthetic construct
  REGION 1..9: note = Description of Artificial Sequence: Synthetic peptide
YRWTTRRTY

SEQ ID NO: 2874 - protein, 9 aa, synthetic construct
  REGION 1..9: note = Description of Artificial Sequence: Synthetic peptide
YRWRTRYTY

SEQ ID NO: 2875 - protein, 9 aa, synthetic construct
  REGION 1..9: note = Description of Artificial Sequence: Synthetic peptide
YRWTTRYTY

SEQ ID NO: 2876 - protein, 9 aa, synthetic construct
  REGION 1..9: note = Description of Artificial Sequence: Synthetic peptide
YRWRTRYTY

SEQ ID NO: 2877 - protein, 9 aa, synthetic construct
  REGION 1..9: note = Description of Artificial Sequence: Synthetic peptide
YHWTTRYTY

SEQ ID NO: 2878 - protein, 9 aa, synthetic construct
  REGION 1..9: note = Description of Artificial Sequence: Synthetic peptide
YRWTTRRTY

SEQ ID NO: 2879 - protein, 9 aa, synthetic construct
  REGION 1..9: note = Description of Artificial Sequence: Synthetic peptide
YRWTTRYTY

SEQ ID NO: 2880 - protein, 9 aa, synthetic construct
  REGION 1..9: note = Description of Artificial Sequence: Synthetic peptide
YRWTTRYTY

SEQ ID NO: 2881 - protein, 9 aa, synthetic construct
  REGION 1..9: note = Description of Artificial Sequence: Synthetic peptide
YRWTTRYAY

SEQ ID NO: 2882 - protein, 9 aa, synthetic construct
  REGION 1..9: note = Description of Artificial Sequence: Synthetic peptide
YRWVTRYTY

SEQ ID NO: 2883 - protein, 9 aa, synthetic construct
  REGION 1..9: note = Description of Artificial Sequence: Synthetic peptide
YRWVTRYTY

SEQ ID NO: 2884 - protein, 9 aa, synthetic construct
  REGION 1..9: note = Description of Artificial Sequence: Synthetic peptide
YRWSTRYTY

SEQ ID NO: 2885 - protein, 9 aa, synthetic construct
  REGION 1..9: note = Description of Artificial Sequence: Synthetic peptide
YRWRTRYTY

SEQ ID NO: 2886 - protein, 9 aa, synthetic construct
  REGION 1..9: note = Description of Artificial Sequence: Synthetic peptide
YRWTTRGTY

SEQ ID NO: 2887 - protein, 9 aa, synthetic construct
  REGION 1..9: note = Description of Artificial Sequence: Synthetic peptide
YRWDTRYTY

SEQ ID NO: 2888 - protein, 9 aa, synthetic construct
  REGION 1..9: note = Description of Artificial Sequence: Synthetic peptide
YRWTTRRTY

SEQ ID NO: 2889 - protein, 9 aa, synthetic construct
  REGION 1..9: note = Description of Artificial Sequence: Synthetic peptide
YRWRTRYTY

SEQ ID NO: 2890 - protein, 9 aa, synthetic construct
  REGION 1..9: note = Description of Artificial Sequence: Synthetic peptide
YRWTGRYTY

SEQ ID NO: 2891 - protein, 9 aa, synthetic construct
  REGION 1..9: note = Description of Artificial Sequence: Synthetic peptide
YRWRTRYTY

SEQ ID NO: 2892 - protein, 9 aa, synthetic construct
  REGION 1..9: note = Description of Artificial Sequence: Synthetic peptide
YRWRTRYTY

SEQ ID NO: 2893 - protein, 9 aa, synthetic construct
  REGION 1..9: note = Description of Artificial Sequence: Synthetic peptide
YRWITRYTY

SEQ ID NO: 2894 - protein, 9 aa, synthetic construct
  REGION 1..9: note = Description of Artificial Sequence: Synthetic peptide
YRWITRYTY

SEQ ID NO: 2895 - protein, 9 aa, synthetic construct
  REGION 1..9: note = Description of Artificial Sequence: Synthetic peptide
YRWRTRYTY

SEQ ID NO: 2896 - protein, 9 aa, synthetic construct
  REGION 1..9: note = Description of Artificial Sequence: Synthetic peptide
YRWTRRYTY

SEQ ID NO: 2897 - protein, 9 aa, synthetic construct
  REGION 1..9: note = Description of Artificial Sequence: Synthetic peptide
YSWTTRYTY

SEQ ID NO: 2898 - protein, 9 aa, synthetic construct
  REGION 1..9: note = Description of Artificial Sequence: Synthetic peptide
YRWTNRYTY

SEQ ID NO: 2899 - protein, 9 aa, synthetic construct
  REGION 1..9: note = Description of Artificial Sequence: Synthetic peptide
YRWTTRYRY

SEQ ID NO: 2900 - protein, 9 aa, synthetic construct
  REGION 1..9: note = Description of Artificial Sequence: Synthetic peptide
YRWTTRYTY

SEQ ID NO: 2901 - protein, 9 aa, synthetic construct
  REGION 1..9: note = Description of Artificial Sequence: Synthetic peptide
YRWTTRYKY

SEQ ID NO: 2902 - protein, 9 aa, synthetic construct
  REGION 1..9: note = Description of Artificial Sequence: Synthetic peptide
YRWHTRYTY

SEQ ID NO: 2903 - protein, 9 aa, synthetic construct
  REGION 1..9: note = Description of Artificial Sequence: Synthetic peptide
YRWTRRYTY

SEQ ID NO: 2904 - protein, 9 aa, synthetic construct
  REGION 1..9: note = Description of Artificial Sequence: Synthetic peptide
YRWMTRYTY

SEQ ID NO: 2905 - protein, 9 aa, synthetic construct
  REGION 1..9: note = Description of Artificial Sequence: Synthetic peptide
YRWTTRYRY

SEQ ID NO: 2906 - protein, 9 aa, synthetic construct
  REGION 1..9: note = Description of Artificial Sequence: Synthetic peptide
YRWSTRYTY

SEQ ID NO: 2907 - protein, 9 aa, synthetic construct
  REGION 1..9: note = Description of Artificial Sequence: Synthetic peptide
YRWTTRYTF

SEQ ID NO: 2908 - protein, 9 aa, synthetic construct
  REGION 1..9: note = Description of Artificial Sequence: Synthetic peptide
YRWRTRYTY

SEQ ID NO: 2909 - protein, 9 aa, synthetic construct
  REGION 1..9: note = Description of Artificial Sequence: Synthetic peptide
YRWTTRRTY

SEQ ID NO: 2910 - protein, 9 aa, synthetic construct
  REGION 1..9: note = Description of Artificial Sequence: Synthetic peptide
YRWATRYTY

SEQ ID NO: 2911 - protein, 9 aa, synthetic construct
  REGION 1..9: note = Description of Artificial Sequence: Synthetic peptide
YRWHTRYTY

SEQ ID NO: 2912 - protein, 9 aa, synthetic construct
  REGION 1..9: note = Description of Artificial Sequence: Synthetic peptide
YRWGTRYTY

SEQ ID NO: 2913 - protein, 9 aa, synthetic construct
  REGION 1..9: note = Description of Artificial Sequence: Synthetic peptide
YRWTTRNTY

SEQ ID NO: 2914 - protein, 9 aa, synthetic construct
  REGION 1..9: note = Description of Artificial Sequence: Synthetic peptide
YRWRTRYTY

SEQ ID NO: 2915 - protein, 9 aa, synthetic construct
  REGION 1..9: note = Description of Artificial Sequence: Synthetic peptide
YRWTTRYAY

SEQ ID NO: 2916 - protein, 9 aa, synthetic construct
  REGION 1..9: note = Description of Artificial Sequence: Synthetic peptide
YRWRTRYTY

SEQ ID NO: 2917 - protein, 9 aa, synthetic construct
  REGION 1..9: note = Description of Artificial Sequence: Synthetic peptide
YRWTTRRTY

SEQ ID NO: 2918 - protein, 9 aa, synthetic construct
  REGION 1..9: note = Description of Artificial Sequence: Synthetic peptide
YRWTTRRTY

SEQ ID NO: 2919 - protein, 9 aa, synthetic construct
  REGION 1..9: note = Description of Artificial Sequence: Synthetic peptide
YRWTSRYTY

SEQ ID NO: 2920 - protein, 9 aa, synthetic construct
  REGION 1..9: note = Description of Artificial Sequence: Synthetic peptide
YRWTTRVTY

SEQ ID NO: 2921 - protein, 9 aa, synthetic construct
  REGION 1..9: note = Description of Artificial Sequence: Synthetic peptide
YRWTTRTTY

SEQ ID NO: 2922 - protein, 9 aa, synthetic construct
  REGION 1..9: note = Description of Artificial Sequence: Synthetic peptide
YRWRTRYTY

SEQ ID NO: 2923 - protein, 9 aa, synthetic construct
  REGION 1..9: note = Description of Artificial Sequence: Synthetic peptide
YRWATRYTY

SEQ ID NO: 2924 - protein, 9 aa, synthetic construct
  REGION 1..9: note = Description of Artificial Sequence: Synthetic peptide
YRWTTRRTY

SEQ ID NO: 2925 - protein, 9 aa, synthetic construct
  REGION 1..9: note = Description of Artificial Sequence: Synthetic peptide
LRWTTRYTY

SEQ ID NO: 2926 - protein, 9 aa, synthetic construct
  REGION 1..9: note = Description of Artificial Sequence: Synthetic peptide
YRWTTRGTY

SEQ ID NO: 2927 - protein, 9 aa, synthetic construct
  REGION 1..9: note = Description of Artificial Sequence: Synthetic peptide
YRWRTRYTY

SEQ ID NO: 2928 - protein, 9 aa, synthetic construct
  REGION 1..9: note = Description of Artificial Sequence: Synthetic peptide
YRWTTRATY

SEQ ID NO: 2929 - protein, 9 aa, synthetic construct
  REGION 1..9: note = Description of Artificial Sequence: Synthetic peptide
YRWTTRRTY

SEQ ID NO: 2930 - protein, 9 aa, synthetic construct
  REGION 1..9: note = Description of Artificial Sequence: Synthetic peptide
YRWPTRYTY

SEQ ID NO: 2931 - protein, 9 aa, synthetic construct
  REGION 1..9: note = Description of Artificial Sequence: Synthetic peptide
YRWRTRYTY

SEQ ID NO: 2932 - protein, 9 aa, synthetic construct
  REGION 1..9: note = Description of Artificial Sequence: Synthetic peptide
YRWKTRYTY

SEQ ID NO: 2933 - protein, 9 aa, synthetic construct
  REGION 1..9: note = Description of Artificial Sequence: Synthetic peptide
YRWSTRYTY

SEQ ID NO: 2934 - protein, 9 aa, synthetic construct
  REGION 1..9: note = Description of Artificial Sequence: Synthetic peptide
YRWKTRRTY

SEQ ID NO: 2935 - protein, 9 aa, synthetic construct
  REGION 1..9: note = Description of Artificial Sequence: Synthetic peptide
YRWTTRRTY

SEQ ID NO: 2936 - protein, 9 aa, synthetic construct
  REGION 1..9: note = Description of Artificial Sequence: Synthetic peptide
YRWTTRYRY

SEQ ID NO: 2937 - protein, 9 aa, synthetic construct
  REGION 1..9: note = Description of Artificial Sequence: Synthetic peptide
YRWRTRYTY

SEQ ID NO: 2938 - protein, 9 aa, synthetic construct
  REGION 1..9: note = Description of Artificial Sequence: Synthetic peptide
YRWTTRYKY

SEQ ID NO: 2939 - protein, 9 aa, synthetic construct
  REGION 1..9: note = Description of Artificial Sequence: Synthetic peptide
YRWKTRYTY

SEQ ID NO: 2940 - protein, 9 aa, synthetic construct
  REGION 1..9: note = Description of Artificial Sequence: Synthetic peptide
YRWTTRVTY

SEQ ID NO: 2941 - protein, 9 aa, synthetic construct
  REGION 1..9: note = Description of Artificial Sequence: Synthetic peptide
YRWTTRFTY

SEQ ID NO: 2942 - protein, 9 aa, synthetic construct
  REGION 1..9: note = Description of Artificial Sequence: Synthetic peptide
YRWTTRFTY

SEQ ID NO: 2943 - protein, 9 aa, synthetic construct
  REGION 1..9: note = Description of Artificial Sequence: Synthetic peptide
YRWRTRYTY

SEQ ID NO: 2944 - protein, 9 aa, synthetic construct
  REGION 1..9: note = Description of Artificial Sequence: Synthetic peptide
YRWTTRYTH

SEQ ID NO: 2945 - protein, 9 aa, synthetic construct
  REGION 1..9: note = Description of Artificial Sequence: Synthetic peptide
YRWTRRYTY

SEQ ID NO: 2946 - protein, 9 aa, synthetic construct
  REGION 1..9: note = Description of Artificial Sequence: Synthetic peptide
YRWTTRYTY

SEQ ID NO: 2947 - protein, 9 aa, synthetic construct
  REGION 1..9: note = Description of Artificial Sequence: Synthetic peptide
YRWTTRSTY

SEQ ID NO: 2948 - protein, 9 aa, synthetic construct
  REGION 1..9: note = Description of Artificial Sequence: Synthetic peptide
YSWTTRYTY

SEQ ID NO: 2949 - protein, 9 aa, synthetic construct
  REGION 1..9: note = Description of Artificial Sequence: Synthetic peptide
YRWTTRGTY

SEQ ID NO: 2950 - protein, 9 aa, synthetic construct
  REGION 1..9: note = Description of Artificial Sequence: Synthetic peptide
YRWKTRYTY

SEQ ID NO: 2951 - protein, 9 aa, synthetic construct
  REGION 1..9: note = Description of Artificial Sequence: Synthetic peptide
YRWTTRFTY

SEQ ID NO: 2952 - protein, 9 aa, synthetic construct
  REGION 1..9: note = Description of Artificial Sequence: Synthetic peptide
YRWRTRYTY

SEQ ID NO: 2953 - protein, 9 aa, synthetic construct
  REGION 1..9: note = Description of Artificial Sequence: Synthetic peptide
YRWTTRRTY

SEQ ID NO: 2954 - protein, 9 aa, synthetic construct
  REGION 1..9: note = Description of Artificial Sequence: Synthetic peptide
YRWSTRYTY

SEQ ID NO: 2955 - protein, 9 aa, synthetic construct
  REGION 1..9: note = Description of Artificial Sequence: Synthetic peptide
YRWTTRLTY

SEQ ID NO: 2956 - protein, 9 aa, synthetic construct
  REGION 1..9: note = Description of Artificial Sequence: Synthetic peptide
YRWTRRYTY

SEQ ID NO: 2957 - protein, 9 aa, synthetic construct
  REGION 1..9: note = Description of Artificial Sequence: Synthetic peptide
YRWTTRLTY

SEQ ID NO: 2958 - protein, 9 aa, synthetic construct
  REGION 1..9: note = Description of Artificial Sequence: Synthetic peptide
YRWTRRYTY

SEQ ID NO: 2959 - protein, 9 aa, synthetic construct
  REGION 1..9: note = Description of Artificial Sequence: Synthetic peptide
YRWTTRRTY

SEQ ID NO: 2960 - protein, 9 aa, synthetic construct
  REGION 1..9: note = Description of Artificial Sequence: Synthetic peptide
YQWTTRYTY

SEQ ID NO: 2961 - protein, 9 aa, synthetic construct
  REGION 1..9: note = Description of Artificial Sequence: Synthetic peptide
YRWTRRYTY

SEQ ID NO: 2962 - protein, 9 aa, synthetic construct
  REGION 1..9: note = Description of Artificial Sequence: Synthetic peptide
YRWTTRMTY

SEQ ID NO: 2963 - protein, 9 aa, synthetic construct
  REGION 1..9: note = Description of Artificial Sequence: Synthetic peptide
YRWTTRRTY

SEQ ID NO: 2964 - protein, 9 aa, synthetic construct
  REGION 1..9: note = Description of Artificial Sequence: Synthetic peptide
YRWTTRYRY

SEQ ID NO: 2965 - protein, 9 aa, synthetic construct
  REGION 1..9: note = Description of Artificial Sequence: Synthetic peptide
YRWLTRYTY

SEQ ID NO: 2966 - protein, 9 aa, synthetic construct
  REGION 1..9: note = Description of Artificial Sequence: Synthetic peptide
YEWTTRYTY

SEQ ID NO: 2967 - protein, 9 aa, synthetic construct
  REGION 1..9: note = Description of Artificial Sequence: Synthetic peptide
YRWRTRYTY

SEQ ID NO: 2968 - protein, 9 aa, synthetic construct
  REGION 1..9: note = Description of Artificial Sequence: Synthetic peptide
YRWRTRYTY

SEQ ID NO: 2969 - protein, 9 aa, synthetic construct
  REGION 1..9: note = Description of Artificial Sequence: Synthetic peptide
YRWRTRYTY

SEQ ID NO: 2970 - protein, 9 aa, synthetic construct
  REGION 1..9: note = Description of Artificial Sequence: Synthetic peptide
YRWSTRYTY

SEQ ID NO: 2971 - protein, 9 aa, synthetic construct
  REGION 1..9: note = Description of Artificial Sequence: Synthetic peptide
YRWTTRLTY

SEQ ID NO: 2972 - protein, 9 aa, synthetic construct
  REGION 1..9: note = Description of Artificial Sequence: Synthetic peptide
YRWTTRLTY

SEQ ID NO: 2973 - protein, 9 aa, synthetic construct
  REGION 1..9: note = Description of Artificial Sequence: Synthetic peptide
YKWTTRYTY

SEQ ID NO: 2974 - protein, 9 aa, synthetic construct
  REGION 1..9: note = Description of Artificial Sequence: Synthetic peptide
YRWTTRSTY

SEQ ID NO: 2975 - protein, 9 aa, synthetic construct
  REGION 1..9: note = Description of Artificial Sequence: Synthetic peptide
YRWRTRYTY

SEQ ID NO: 2976 - protein, 9 aa, synthetic construct
  REGION 1..9: note = Description of Artificial Sequence: Synthetic peptide
YRWSTRYTY

SEQ ID NO: 2977 - protein, 9 aa, synthetic construct
  REGION 1..9: note = Description of Artificial Sequence: Synthetic peptide
YRWTTRYTY

SEQ ID NO: 2978 - protein, 9 aa, synthetic construct
  REGION 1..9: note = Description of Artificial Sequence: Synthetic peptide
YRWRTRYTY

SEQ ID NO: 2979 - protein, 9 aa, synthetic construct
  REGION 1..9: note = Description of Artificial Sequence: Synthetic peptide
YRWLTRYTY

SEQ ID NO: 2980 - protein, 9 aa, synthetic construct
  REGION 1..9: note = Description of Artificial Sequence: Synthetic peptide
YRWRTRYTY

SEQ ID NO: 2981 - protein, 9 aa, synthetic construct
  REGION 1..9: note = Description of Artificial Sequence: Synthetic peptide
YRWTTRYTY

SEQ ID NO: 2982 - protein, 9 aa, synthetic construct
  REGION 1..9: note = Description of Artificial Sequence: Synthetic peptide
YRWTTRYRY

SEQ ID NO: 2983 - protein, 9 aa, synthetic construct
  REGION 1..9: note = Description of Artificial Sequence: Synthetic peptide
YRWTTRYTY

SEQ ID NO: 2984 - protein, 9 aa, synthetic construct
  REGION 1..9: note = Description of Artificial Sequence: Synthetic peptide
YRWPTRYTY

SEQ ID NO: 2985 - protein, 9 aa, synthetic construct
  REGION 1..9: note = Description of Artificial Sequence: Synthetic peptide
YRWTTRHTY

SEQ ID NO: 2986 - protein, 9 aa, synthetic construct
  REGION 1..9: note = Description of Artificial Sequence: Synthetic peptide
YRWTRRYTY

SEQ ID NO: 2987 - protein, 9 aa, synthetic construct
  REGION 1..9: note = Description of Artificial Sequence: Synthetic peptide
YRWHTRYTY

SEQ ID NO: 2988 - protein, 9 aa, synthetic construct
  REGION 1..9: note = Description of Artificial Sequence: Synthetic peptide
YRWTNRYTY

SEQ ID NO: 2989 - protein, 9 aa, synthetic construct
  REGION 1..9: note = Description of Artificial Sequence: Synthetic peptide
YRWTTRYRY

SEQ ID NO: 2990 - protein, 9 aa, synthetic construct
  REGION 1..9: note = Description of Artificial Sequence: Synthetic peptide
YRWTTRRTY

SEQ ID NO: 2991 - protein, 9 aa, synthetic construct
  REGION 1..9: note = Description of Artificial Sequence: Synthetic peptide
YRWSTRYTY

SEQ ID NO: 2992 - protein, 9 aa, synthetic construct
  REGION 1..9: note = Description of Artificial Sequence: Synthetic peptide
YRWSTRYTY

SEQ ID NO: 2993 - protein, 9 aa, synthetic construct
  REGION 1..9: note = Description of Artificial Sequence: Synthetic peptide
YRWRTRYTY

SEQ ID NO: 2994 - protein, 9 aa, synthetic construct
  REGION 1..9: note = Description of Artificial Sequence: Synthetic peptide
YRWTTRYTY

SEQ ID NO: 2995 - protein, 9 aa, synthetic construct
  REGION 1..9: note = Description of Artificial Sequence: Synthetic peptide
YEWTTRYTY

SEQ ID NO: 2996 - protein, 9 aa, synthetic construct
  REGION 1..9: note = Description of Artificial Sequence: Synthetic peptide
YRWTTRSTY

SEQ ID NO: 2997 - protein, 9 aa, synthetic construct
  REGION 1..9: note = Description of Artificial Sequence: Synthetic peptide
YRWTTRYTY

SEQ ID NO: 2998 - protein, 9 aa, synthetic construct
  REGION 1..9: note = Description of Artificial Sequence: Synthetic peptide
YRWSTRYTY

SEQ ID NO: 2999 - protein, 9 aa, synthetic construct
  REGION 1..9: note = Description of Artificial Sequence: Synthetic peptide
YRWSTRYTY

SEQ ID NO: 3000 - protein, 9 aa, synthetic construct
  REGION 1..9: note = Description of Artificial Sequence: Synthetic peptide
YRWTYRYTY

SEQ ID NO: 3001 - protein, 9 aa, synthetic construct
  REGION 1..9: note = Description of Artificial Sequence: Synthetic peptide
YRWTTRLTY

SEQ ID NO: 3002 - protein, 9 aa, synthetic construct
  REGION 1..9: note = Description of Artificial Sequence: Synthetic peptide
YEWTTRYTY

SEQ ID NO: 3003 - protein, 9 aa, synthetic construct
  REGION 1..9: note = Description of Artificial Sequence: Synthetic peptide
YRWTTRLTY

SEQ ID NO: 3004 - protein, 11 aa, synthetic construct
  REGION 1..11: note = Description of Artificial Sequence: Synthetic peptide
FRPAAGSPMRY

SEQ ID NO: 3005 - protein, 11 aa, synthetic construct
  REGION 1..11: note = Description of Artificial Sequence: Synthetic peptide
FRTVDGSPLRY

SEQ ID NO: 3006 - protein, 11 aa, synthetic construct
  REGION 1..11: note = Description of Artificial Sequence: Synthetic peptide
FRTVSGSSKRY

SEQ ID NO: 3007 - protein, 11 aa, synthetic construct
  REGION 1..11: note = Description of Artificial Sequence: Synthetic peptide
FSAGSGTEMSY

SEQ ID NO: 3008 - protein, 11 aa, synthetic construct
  REGION 1..11: note = Description of Artificial Sequence: Synthetic peptide
FGSLSGSSTTY

SEQ ID NO: 3009 - protein, 11 aa, synthetic construct
  REGION 1..11: note = Description of Artificial Sequence: Synthetic peptide
FGSVSGSWTRY

SEQ ID NO: 3010 - protein, 11 aa, synthetic construct
  REGION 1..11: note = Description of Artificial Sequence: Synthetic peptide
FRLVSGSSMSY

SEQ ID NO: 3011 - protein, 11 aa, synthetic construct
  REGION 1..11: note = Description of Artificial Sequence: Synthetic peptide
FRTGSGTSKSY

SEQ ID NO: 3012 - protein, 11 aa, synthetic construct
  REGION 1..11: note = Description of Artificial Sequence: Synthetic peptide
FSNMSGTTRRY

SEQ ID NO: 3013 - protein, 11 aa, synthetic construct
  REGION 1..11: note = Description of Artificial Sequence: Synthetic peptide
FRTVPGSAMGY

SEQ ID NO: 3014 - protein, 11 aa, synthetic construct
  REGION 1..11: note = Description of Artificial Sequence: Synthetic peptide
FRAESGSSMGY

SEQ ID NO: 3015 - protein, 11 aa, synthetic construct
  REGION 1..11: note = Description of Artificial Sequence: Synthetic peptide
FRTLYGSSRSY

SEQ ID NO: 3016 - protein, 11 aa, synthetic construct
  REGION 1..11: note = Description of Artificial Sequence: Synthetic peptide
FSPFSGSDTGY

SEQ ID NO: 3017 - protein, 11 aa, synthetic construct
  REGION 1..11: note = Description of Artificial Sequence: Synthetic peptide
FSTFSGSSISY

SEQ ID NO: 3018 - protein, 11 aa, synthetic construct
  REGION 1..11: note = Description of Artificial Sequence: Synthetic peptide
FRTLAGSEMRY

SEQ ID NO: 3019 - protein, 11 aa, synthetic construct
  REGION 1..11: note = Description of Artificial Sequence: Synthetic peptide
FRTVSGSGVRY

SEQ ID NO: 3020 - protein, 11 aa, synthetic construct
  REGION 1..11: note = Description of Artificial Sequence: Synthetic peptide
FRPGAGHSNSY

SEQ ID NO: 3021 - protein, 11 aa, synthetic construct
  REGION 1..11: note = Description of Artificial Sequence: Synthetic peptide
FRRASGTAMSY

SEQ ID NO: 3022 - protein, 11 aa, synthetic construct
  REGION 1..11: note = Description of Artificial Sequence: Synthetic peptide
FTSASGTDLSY

SEQ ID NO: 3023 - protein, 11 aa, synthetic construct
  REGION 1..11: note = Description of Artificial Sequence: Synthetic peptide
FRSANGSSKRY

SEQ ID NO: 3024 - protein, 11 aa, synthetic construct
  REGION 1..11: note = Description of Artificial Sequence: Synthetic peptide
FKTIAGAGMRY

SEQ ID NO: 3025 - protein, 11 aa, synthetic construct
  REGION 1..11: note = Description of Artificial Sequence: Synthetic peptide
FRYGSGSSLSY

SEQ ID NO: 3026 - protein, 11 aa, synthetic construct
  REGION 1..11: note = Description of Artificial Sequence: Synthetic peptide
FRTVPGASMKY

SEQ ID NO: 3027 - protein, 11 aa, synthetic construct
  REGION 1..11: note = Description of Artificial Sequence: Synthetic peptide
FRTVDGSAISY

SEQ ID NO: 3028 - protein, 11 aa, synthetic construct
  REGION 1..11: note = Description of Artificial Sequence: Synthetic peptide
FRTVKGSGGSY

SEQ ID NO: 3029 - protein, 11 aa, synthetic construct
  REGION 1..11: note = Description of Artificial Sequence: Synthetic peptide
FRTVSGSSRGY

SEQ ID NO: 3030 - protein, 11 aa, synthetic construct
  REGION 1..11: note = Description of Artificial Sequence: Synthetic peptide
FRPGPGSQMAY

SEQ ID NO: 3031 - protein, 11 aa, synthetic construct
  REGION 1..11: note = Description of Artificial Sequence: Synthetic peptide
FRTVAGSASGY

SEQ ID NO: 3032 - protein, 11 aa, synthetic construct
  REGION 1..11: note = Description of Artificial Sequence: Synthetic peptide
FRTVSGSSYSY

SEQ ID NO: 3033 - protein, 11 aa, synthetic construct
  REGION 1..11: note = Description of Artificial Sequence: Synthetic peptide
FINLKGSSMAY

SEQ ID NO: 3034 - protein, 11 aa, synthetic construct
  REGION 1..11: note = Description of Artificial Sequence: Synthetic peptide
FRMVTGSYGGY

SEQ ID NO: 3035 - protein, 11 aa, synthetic construct
  REGION 1..11: note = Description of Artificial Sequence: Synthetic peptide
FKSSYGLPMRY

SEQ ID NO: 3036 - protein, 11 aa, synthetic construct
  REGION 1..11: note = Description of Artificial Sequence: Synthetic peptide
FKTVSGQSLRY

SEQ ID NO: 3037 - protein, 11 aa, synthetic construct
  REGION 1..11: note = Description of Artificial Sequence: Synthetic peptide
FRTVTGRAARY

SEQ ID NO: 3038 - protein, 11 aa, synthetic construct
  REGION 1..11: note = Description of Artificial Sequence: Synthetic peptide
FGPAIGASRTY

SEQ ID NO: 3039 - protein, 11 aa, synthetic construct
  REGION 1..11: note = Description of Artificial Sequence: Synthetic peptide
FRTVSGAPKSY

SEQ ID NO: 3040 - protein, 11 aa, synthetic construct
  REGION 1..11: note = Description of Artificial Sequence: Synthetic peptide
FHTVSGSSMSY

SEQ ID NO: 3041 - protein, 11 aa, synthetic construct
  REGION 1..11: note = Description of Artificial Sequence: Synthetic peptide
FRRLEGYSNRY

SEQ ID NO: 3042 - protein, 11 aa, synthetic construct
  REGION 1..11: note = Description of Artificial Sequence: Synthetic peptide
FRTGSGSSMGY

SEQ ID NO: 3043 - protein, 11 aa, synthetic construct
  REGION 1..11: note = Description of Artificial Sequence: Synthetic peptide
FTTVTGSSMSY

SEQ ID NO: 3044 - protein, 9 aa, synthetic construct
  REGION 1..9: note = Description of Artificial Sequence: Synthetic peptide
YYWTERRPY

SEQ ID NO: 3045 - protein, 9 aa, synthetic construct
  REGION 1..9: note = Description of Artificial Sequence: Synthetic peptide
YSWDDAHPY

SEQ ID NO: 3046 - protein, 9 aa, synthetic construct
  REGION 1..9: note = Description of Artificial Sequence: Synthetic peptide
YRWMTRLTY

SEQ ID NO: 3047 - protein, 9 aa, synthetic construct
  REGION 1..9: note = Description of Artificial Sequence: Synthetic peptide
YDWADAQPY

SEQ ID NO: 3048 - protein, 9 aa, synthetic construct
  REGION 1..9: note = Description of Artificial Sequence: Synthetic peptide
YSWTDRLPY

SEQ ID NO: 3049 - protein, 9 aa, synthetic construct
  REGION 1..9: note = Description of Artificial Sequence: Synthetic peptide
YRWATRLPY

SEQ ID NO: 3050 - protein, 9 aa, synthetic construct
  REGION 1..9: note = Description of Artificial Sequence: Synthetic peptide
YKWSNRLPY

SEQ ID NO: 3051 - protein, 9 aa, synthetic construct
  REGION 1..9: note = Description of Artificial Sequence: Synthetic peptide
YGWKTRQPY

SEQ ID NO: 3052 - protein, 9 aa, synthetic construct
  REGION 1..9: note = Description of Artificial Sequence: Synthetic peptide
YRWPNRRGY

SEQ ID NO: 3053 - protein, 9 aa, synthetic construct
  REGION 1..9: note = Description of Artificial Sequence: Synthetic peptide
YDWTTRQRY

SEQ ID NO: 3054 - protein, 9 aa, synthetic construct
  REGION 1..9: note = Description of Artificial Sequence: Synthetic peptide
YNWSYAQPY

SEQ ID NO: 3055 - protein, 9 aa, synthetic construct
  REGION 1..9: note = Description of Artificial Sequence: Synthetic peptide
YNWTDSLQY

SEQ ID NO: 3056 - protein, 9 aa, synthetic construct
  REGION 1..9: note = Description of Artificial Sequence: Synthetic peptide
YSWTTSLPY

SEQ ID NO: 3057 - protein, 9 aa, synthetic construct
  REGION 1..9: note = Description of Artificial Sequence: Synthetic peptide
YKWRSRSTY

SEQ ID NO: 3058 - protein, 9 aa, synthetic construct
  REGION 1..9: note = Description of Artificial Sequence: Synthetic peptide
YSQTTRDPY

SEQ ID NO: 3059 - protein, 9 aa, synthetic construct
  REGION 1..9: note = Description of Artificial Sequence: Synthetic peptide
YRWTARDTY

SEQ ID NO: 3060 - protein, 9 aa, synthetic construct
  REGION 1..9: note = Description of Artificial Sequence: Synthetic peptide
YRWTSRLSY

SEQ ID NO: 3061 - protein, 9 aa, synthetic construct
  REGION 1..9: note = Description of Artificial Sequence: Synthetic peptide
YSWTTRSRY

SEQ ID NO: 3062 - protein, 9 aa, synthetic construct
  REGION 1..9: note = Description of Artificial Sequence: Synthetic peptide
YNWTSRYRY

SEQ ID NO: 3063 - protein, 9 aa, synthetic construct
  REGION 1..9: note = Description of Artificial Sequence: Synthetic peptide
YSWKTRFPY

SEQ ID NO: 3064 - protein, 9 aa, synthetic construct
  REGION 1..9: note = Description of Artificial Sequence: Synthetic peptide
YSWTTRYPY

SEQ ID NO: 3065 - protein, 9 aa, synthetic construct
  REGION 1..9: note = Description of Artificial Sequence: Synthetic peptide
YEWTNALPY

SEQ ID NO: 3066 - protein, 9 aa, synthetic construct
  REGION 1..9: note = Description of Artificial Sequence: Synthetic peptide
YSWITRSPY

SEQ ID NO: 3067 - protein, 9 aa, synthetic construct
  REGION 1..9: note = Description of Artificial Sequence: Synthetic peptide
YSWTTRRQY

SEQ ID NO: 3068 - skipped

SEQ ID NO: 3069 - protein, 9 aa, synthetic construct
  REGION 1..9: note = Description of Artificial Sequence: Synthetic peptide
YSWITRSPY

SEQ ID NO: 3070 - protein, 9 aa, synthetic construct
  REGION 1..9: note = Description of Artificial Sequence: Synthetic peptide
YRWEESRQY

SEQ ID NO: 3071 - protein, 9 aa, synthetic construct
  REGION 1..9: note = Description of Artificial Sequence: Synthetic peptide
YTWTTRLPY

SEQ ID NO: 3072 - protein, 9 aa, synthetic construct
  REGION 1..9: note = Description of Artificial Sequence: Synthetic peptide
YRWEESRQY

SEQ ID NO: 3073 - protein, 9 aa, synthetic construct
  REGION 1..9: note = Description of Artificial Sequence: Synthetic peptide
YSWTTRQPY

SEQ ID NO: 3074 - protein, 9 aa, synthetic construct
  REGION 1..9: note = Description of Artificial Sequence: Synthetic peptide
YVWGTRLPY

SEQ ID NO: 3075 - protein, 9 aa, synthetic construct
  REGION 1..9: note = Description of Artificial Sequence: Synthetic peptide
YEWTNALPY

SEQ ID NO: 3076 - protein, 9 aa, synthetic construct
  REGION 1..9: note = Description of Artificial Sequence: Synthetic peptide
YRWEDALTY

SEQ ID NO: 3077 - protein, 9 aa, synthetic construct
  REGION 1..9: note = Description of Artificial Sequence: Synthetic peptide
YSWTTRYPY

SEQ ID NO: 3078 - protein, 9 aa, synthetic construct
  REGION 1..9: note = Description of Artificial Sequence: Synthetic peptide
YSWIDSLRY

SEQ ID NO: 3079 - protein, 9 aa, synthetic construct
  REGION 1..9: note = Description of Artificial Sequence: Synthetic peptide
YSWTTPRAY

SEQ ID NO: 3080 - protein, 9 aa, synthetic construct
  REGION 1..9: note = Description of Artificial Sequence: Synthetic peptide
YSWTTSLPY

SEQ ID NO: 3081 - protein, 10 aa, synthetic construct
  REGION 1..10: note = Description of Artificial Sequence: Synthetic peptide
GFTFNKYAMN

SEQ ID NO: 3082 - protein, 18 aa, synthetic construct
  REGION 1..18: note = Description of Artificial Sequence: Synthetic peptide
RIRSKYNNYATYYADSVK

SEQ ID NO: 3083 - protein, 14 aa, synthetic construct
  REGION 1..14: note = Description of Artificial Sequence: Synthetic peptide
HGNFGNSYISYWAY

SEQ ID NO: 3084 - protein, 14 aa, synthetic construct
  REGION 1..14: note = Description of Artificial Sequence: Synthetic peptide
GSSTGAVTSGNYPN

SEQ ID NO: 3085 - protein, 7 aa, synthetic construct
  REGION 1..7: note = Description of Artificial Sequence: Synthetic peptide
GTKFLAP

SEQ ID NO: 3086 - protein, 9 aa, synthetic construct
  REGION 1..9: note = Description of Artificial Sequence: Synthetic peptide
VLWYSNRWV

SEQ ID NO: 3087 - protein, 10 aa, synthetic construct
  REGION 1..10: note = Description of Artificial Sequence: Synthetic peptide
GNTFNKYAMN

SEQ ID NO: 3088 - protein, 10 aa, synthetic construct
  REGION 1..10: note = Description of Artificial Sequence: Synthetic peptide
GFEFNKYAMN

SEQ ID NO: 3089 - protein, 10 aa, synthetic construct
  REGION 1..10: note = Description of Artificial Sequence: Synthetic peptide
GFMFNKYAMN

SEQ ID NO: 3090 - protein, 10 aa, synthetic construct
  REGION 1..10: note = Description of Artificial Sequence: Synthetic peptide
GFTYNKYAMN

SEQ ID NO: 3091 - protein, 10 aa, synthetic construct
  REGION 1..10: note = Description of Artificial Sequence: Synthetic peptide
GFTFNNYAMN

SEQ ID NO: 3092 - protein, 10 aa, synthetic construct
  REGION 1..10: note = Description of Artificial Sequence: Synthetic peptide
GFTFNGYAMN

SEQ ID NO: 3093 - protein, 10 aa, synthetic construct
  REGION 1..10: note = Description of Artificial Sequence: Synthetic peptide
GFTFNTYAMN

SEQ ID NO: 3094 - protein, 10 aa, synthetic construct
  REGION 1..10: note = Description of Artificial Sequence: Synthetic peptide
GFTFNEYAMN

SEQ ID NO: 3095 - protein, 10 aa, synthetic construct
  REGION 1..10: note = Description of Artificial Sequence: Synthetic peptide
GFTFNKYPMN

SEQ ID NO: 3096 - protein, 10 aa, synthetic construct
  REGION 1..10: note = Description of Artificial Sequence: Synthetic peptide
GFTFNKYAVN

SEQ ID NO: 3097 - protein, 10 aa, synthetic construct
  REGION 1..10: note = Description of Artificial Sequence: Synthetic peptide
GFTFNKYAIN

SEQ ID NO: 3098 - protein, 10 aa, synthetic construct
  REGION 1..10: note = Description of Artificial Sequence: Synthetic peptide
GFTFNKYALN

SEQ ID NO: 3099 - protein, 18 aa, synthetic construct
  REGION 1..18: note = Description of Artificial Sequence: Synthetic peptide
RIRSGYNNYATYYADSVK

SEQ ID NO: 3100 - protein, 18 aa, synthetic construct
  REGION 1..18: note = Description of Artificial Sequence: Synthetic peptide
RIRSKSNNYATYYADSVK

SEQ ID NO: 3101 - protein, 18 aa, synthetic construct
  REGION 1..18: note = Description of Artificial Sequence: Synthetic peptide
RIRSKYNKYATYYADSVK

SEQ ID NO: 3102 - protein, 18 aa, synthetic construct
  REGION 1..18: note = Description of Artificial Sequence: Synthetic peptide
RIRSKYNNYETYYADSVK

SEQ ID NO: 3103 - protein, 18 aa, synthetic construct
  REGION 1..18: note = Description of Artificial Sequence: Synthetic peptide
RIRSKYNNYATEYADSVK

SEQ ID NO: 3104 - protein, 18 aa, synthetic construct
  REGION 1..18: note = Description of Artificial Sequence: Synthetic peptide
RIRSKYNNYATYYKDSVK

SEQ ID NO: 3105 - protein, 18 aa, synthetic construct
  REGION 1..18: note = Description of Artificial Sequence: Synthetic peptide
RIRSKYNNYATYYADEVK

SEQ ID NO: 3106 - protein, 18 aa, synthetic construct
  REGION 1..18: note = Description of Artificial Sequence: Synthetic peptide
RIRSKYNNYATYYADAVK

SEQ ID NO: 3107 - skipped

SEQ ID NO: 3108 - protein, 18 aa, synthetic construct
  REGION 1..18: note = Description of Artificial Sequence: Synthetic peptide
RIRSKYNNYATYYADQVK

SEQ ID NO: 3109 - protein, 18 aa, synthetic construct
  REGION 1..18: note = Description of Artificial Sequence: Synthetic peptide
RIRSKYNNYATYYADDVK

SEQ ID NO: 3110 - protein, 14 aa, synthetic construct
  REGION 1..14: note = Description of Artificial Sequence: Synthetic peptide
HANFGNSYISYWAY

SEQ ID NO: 3111 - protein, 14 aa, synthetic construct
  REGION 1..14: note = Description of Artificial Sequence: Synthetic peptide
HTNFGNSYISYWAY

SEQ ID NO: 3112 - protein, 14 aa, synthetic construct
  REGION 1..14: note = Description of Artificial Sequence: Synthetic peptide
HGNFNNSYISYWAY

SEQ ID NO: 3113 - protein, 14 aa, synthetic construct
  REGION 1..14: note = Description of Artificial Sequence: Synthetic peptide
HGNFGDSYISYWAY

SEQ ID NO: 3114 - protein, 14 aa, synthetic construct
  REGION 1..14: note = Description of Artificial Sequence: Synthetic peptide
HGNFGNSHISYWAY

SEQ ID NO: 3115 - protein, 14 aa, synthetic construct
  REGION 1..14: note = Description of Artificial Sequence: Synthetic peptide
HGNFGNSPISYWAY

SEQ ID NO: 3116 - protein, 14 aa, synthetic construct
  REGION 1..14: note = Description of Artificial Sequence: Synthetic peptide
HGNFGNSQISYWAY

SEQ ID NO: 3117 - protein, 14 aa, synthetic construct
  REGION 1..14: note = Description of Artificial Sequence: Synthetic peptide
HGNFGNSLISYWAY

SEQ ID NO: 3118 - protein, 14 aa, synthetic construct
  REGION 1..14: note = Description of Artificial Sequence: Synthetic peptide
HGNFGNSGISYWAY

SEQ ID NO: 3119 - protein, 14 aa, synthetic construct
  REGION 1..14: note = Description of Artificial Sequence: Synthetic peptide
HGNFGNSYISYWAT

SEQ ID NO: 3120 - protein, 14 aa, synthetic construct
  REGION 1..14: note = Description of Artificial Sequence: Synthetic peptide
ASSTGAVTSGNYPN

SEQ ID NO: 3121 - protein, 14 aa, synthetic construct
  REGION 1..14: note = Description of Artificial Sequence: Synthetic peptide
GESTGAVTSGNYPN

SEQ ID NO: 3122 - protein, 14 aa, synthetic construct
  REGION 1..14: note = Description of Artificial Sequence: Synthetic peptide
GSYTGAVTSGNYPN

SEQ ID NO: 3123 - protein, 14 aa, synthetic construct
  REGION 1..14: note = Description of Artificial Sequence: Synthetic peptide
GSSFGAVTSGNYPN

SEQ ID NO: 3124 - protein, 14 aa, synthetic construct
  REGION 1..14: note = Description of Artificial Sequence: Synthetic peptide
GSSKGAVTSGNYPN

SEQ ID NO: 3125 - protein, 14 aa, synthetic construct
  REGION 1..14: note = Description of Artificial Sequence: Synthetic peptide
GSSSGAVTSGNYPN

SEQ ID NO: 3126 - protein, 14 aa, synthetic construct
  REGION 1..14: note = Description of Artificial Sequence: Synthetic peptide
GSSTGYVTSGNYPN

SEQ ID NO: 3127 - protein, 14 aa, synthetic construct
  REGION 1..14: note = Description of Artificial Sequence: Synthetic peptide
GSSTGAVVSGNYPN

SEQ ID NO: 3128 - protein, 14 aa, synthetic construct
  REGION 1..14: note = Description of Artificial Sequence: Synthetic peptide
GSSTGAVTDGNYPN

SEQ ID NO: 3129 - protein, 14 aa, synthetic construct
  REGION 1..14: note = Description of Artificial Sequence: Synthetic peptide
GSSTGAVTKGNYPN

SEQ ID NO: 3130 - protein, 14 aa, synthetic construct
  REGION 1..14: note = Description of Artificial Sequence: Synthetic peptide
GSSTGAVTHGNYPN

SEQ ID NO: 3131 - protein, 14 aa, synthetic construct
  REGION 1..14: note = Description of Artificial Sequence: Synthetic peptide
GSSTGAVTVGNYPN

SEQ ID NO: 3132 - protein, 14 aa, synthetic construct
  REGION 1..14: note = Description of Artificial Sequence: Synthetic peptide
GSSTGAVTSGYYPN

SEQ ID NO: 3133 - protein, 7 aa, synthetic construct
  REGION 1..7: note = Description of Artificial Sequence: Synthetic peptide
GIKFLAP

SEQ ID NO: 3134 - protein, 7 aa, synthetic construct
  REGION 1..7: note = Description of Artificial Sequence: Synthetic peptide
GTEFLAP

SEQ ID NO: 3135 - protein, 7 aa, synthetic construct
  REGION 1..7: note = Description of Artificial Sequence: Synthetic peptide
GTYFLAP

SEQ ID NO: 3136 - protein, 7 aa, synthetic construct
  REGION 1..7: note = Description of Artificial Sequence: Synthetic peptide
GTSFLAP

SEQ ID NO: 3137 - protein, 7 aa, synthetic construct
  REGION 1..7: note = Description of Artificial Sequence: Synthetic peptide
GTNFLAP

SEQ ID NO: 3138 - protein, 7 aa, synthetic construct
  REGION 1..7: note = Description of Artificial Sequence: Synthetic peptide
GTKLLAP

SEQ ID NO: 3139 - protein, 7 aa, synthetic construct
  REGION 1..7: note = Description of Artificial Sequence: Synthetic peptide
GTKELAP

SEQ ID NO: 3140 - protein, 7 aa, synthetic construct
  REGION 1..7: note = Description of Artificial Sequence: Synthetic peptide
GTKILAP

SEQ ID NO: 3141 - protein, 7 aa, synthetic construct
  REGION 1..7: note = Description of Artificial Sequence: Synthetic peptide
GTKMLAP

SEQ ID NO: 3142 - protein, 7 aa, synthetic construct
  REGION 1..7: note = Description of Artificial Sequence: Synthetic peptide
GTKVLAP

SEQ ID NO: 3143 - protein, 7 aa, synthetic construct
  REGION 1..7: note = Description of Artificial Sequence: Synthetic peptide
GTKFNAP

SEQ ID NO: 3144 - protein, 7 aa, synthetic construct
  REGION 1..7: note = Description of Artificial Sequence: Synthetic peptide
GTKFGAP

SEQ ID NO: 3145 - protein, 7 aa, synthetic construct
  REGION 1..7: note = Description of Artificial Sequence: Synthetic peptide
GTKFLVP

SEQ ID NO: 3146 - protein, 9 aa, synthetic construct
  REGION 1..9: note = Description of Artificial Sequence: Synthetic peptide
TLWYSNRWV

SEQ ID NO: 3147 - protein, 9 aa, synthetic construct
  REGION 1..9: note = Description of Artificial Sequence: Synthetic peptide
ALWYSNRWV

SEQ ID NO: 3148 - protein, 9 aa, synthetic construct
  REGION 1..9: note = Description of Artificial Sequence: Synthetic peptide
VLWYDNRWV

SEQ ID NO: 3149 - protein, 9 aa, synthetic construct
  REGION 1..9: note = Description of Artificial Sequence: Synthetic peptide
VLWYANRWV

SEQ ID NO: 3150 - protein, 9 aa, synthetic construct
  REGION 1..9: note = Description of Artificial Sequence: Synthetic peptide
VLWYSNSWV

SEQ ID NO: 3151 - protein, 9 aa, synthetic construct
  REGION 1..9: note = Description of Artificial Sequence: Synthetic peptide
VLWYSNRWI

SEQ ID NO: 3152 - protein, 9 aa, synthetic construct
  REGION 1..9: note = Description of Artificial Sequence: Synthetic peptide
VLWYSNRWA

SEQ ID NO: 3153 - protein, 249 aa, synthetic construct
  REGION 1..249: note = Description of Artificial Sequence: Synthetic polypeptide
EVQLVESGGGLVQPGGSLKLSCAASGFTFNKYAINWVRQAPGKGLEWVARIRSKYNNYATYYADQVKDRFTISRDDSKNTAYLQMNNLKTEDTAVYYCVRHANFGNSYISYWAYWGQGTLVTVSSGGGGSGGGGSGGGGSQTVVTQEPSLTVSPGGTVTLTCASSTGAVTSGNYPNWVQQKPGQAPRGLIGGTKFLVPGTPARFSGSLLGGKAALTLSGVQPEDEAEYYCTLWYSNRWVFGGGTKLTVL

SEQ ID NO: 3154 - protein, 249 aa, synthetic construct
  REGION 1..249: note = Description of Artificial Sequence: Synthetic polypeptide
EVQLVESGGGLVQPGGSLKLSCAASGFEFNKYAMNWVRQAPGKGLEWVARIRSKYNKYATYYADSVKDRFTISRDDSKNTAYLQMNNLKTEDTAVYYCVRHGNFGNSYISYWAYWGQGTLVTVSSGGGGSGGGGSGGGGSQTVVTQEPSLTVSPGGTVTLTCGSSFGAVTSGNYPNWVQQKPGQAPRGLIGGTKFLAPGTPARFSGSLLGGKAALTLSGVQPEDEAEYYCVLWYDNRWVFGGGTKLTVL

SEQ ID NO: 3155 - protein, 249 aa, synthetic construct
  REGION 1..249: note = Description of Artificial Sequence: Synthetic polypeptide
EVQLVESGGGLVQPGGSLKLSCAASGFTFNKYAMNWVRQAPGKGLEWVARIRSKYNNYATYYADSVKDRFTISRDDSKNTAYLQMNNLKTEDTAVYYCVRHGNFGNSHISYWAYWGQGTLVTVSSGGGGSGGGGSGGGGSQTVVTQEPSLTVSPGGTVTLTCGSSTGYVTSGNYPNWVQQKPGQAPRGLIGGTSFLAPGTPARFSGSLLGGKAALTLSGVQPEDEAEYYCVLWYSNRWIFGGGTKLTVL

SEQ ID NO: 3156 - protein, 249 aa, synthetic construct
  REGION 1..249: note = Description of Artificial Sequence: Synthetic polypeptide
EVQLVESGGGLVQPGGSLKLSCAASGFMFNKYAMNWVRQAPGKGLEWVARIRSKSNNYATYYADSVKDRFTISRDDSKNTAYLQMNNLKTEDTAVYYCVRHGNFGNSYISYWATWGQGTLVTVSSGGGGSGGGGSGGGGSQTVVTQEPSLTVSPGGTVTLTCGSSFGAVTSGNYPNWVQQKPGQAPRGLIGGTKLLAPGTPARFSGSLLGGKAALTLSGVQPEDEAEYYCVLWYSNSWVFGGGTKLTVL

SEQ ID NO: 3157 - protein, 249 aa, synthetic construct
  REGION 1..249: note = Description of Artificial Sequence: Synthetic polypeptide
EVQLVESGGGLVQPGGSLKLSCAASGFTFNTYAMNWVRQAPGKGLEWVARIRSKYNNYATYYKDSVKDRFTISRDDSKNTAYLQMNNLKTEDTAVYYCVRHGNFGNSPISYWAYWGQGTLVTVSSGGGGSGGGGSGGGGSQTVVTQEPSLTVSPGGTVTLTCGSSTGAVVSGNYPNWVQQKPGQAPRGLIGGTEFLAPGTPARFSGSLLGGKAALTLSGVQPEDEAEYYCVLWYSNRWVFGGGTKLTVL

SEQ ID NO: 3158 - protein, 249 aa, synthetic construct
  REGION 1..249: note = Description of Artificial Sequence: Synthetic polypeptide
EVQLVESGGGLVQPGGSLKLSCAASGFTYNKYAMNWVRQAPGKGLEWVARIRSKYNNYATYYADEVKDRFTISRDDSKNTAYLQMNNLKTEDTAVYYCVRHGNFGNSPISYWAYWGQGTLVTVSSGGGGSGGGGSGGGGSQTVVTQEPSLTVSPGGTVTLTCGSSKGAVTSGNYPNWVQQKPGQAPRGLIGGTKELAPGTPARFSGSLLGGKAALTLSGVQPEDEAEYYCTLWYSNRWVFGGGTKLTVL

SEQ ID NO: 3159 - protein, 249 aa, synthetic construct
  REGION 1..249: note = Description of Artificial Sequence: Synthetic polypeptide
EVQLVESGGGLVQPGGSLKLSCAASGNTFNKYAMNWVRQAPGKGLEWVARIRSKYNNYETYYADSVKDRFTISRDDSKNTAYLQMNNLKTEDTAVYYCVRHTNFGNSYISYWAYWGQGTLVTVSSGGGGSGGGGSGGGGSQTVVTQEPSLTVSPGGTVTLTCGSSTGAVTSGYYPNWVQQKPGQAPRGLIGGTYFLAPGTPARFSGSLLGGKAALTLSGVQPEDEAEYYCVLWYSNRWVFGGGTKLTVL

SEQ ID NO: 3160 - protein, 249 aa, synthetic construct
  REGION 1..249: note = Description of Artificial Sequence: Synthetic polypeptide
EVQLVESGGGLVQPGGSLKLSCAASGFTFNNYAMNWVRQAPGKGLEWVARIRSKYNNYATYYADAVKDRFTISRDDSKNTAYLQMNNLKTEDTAVYYCVRHGNFGNSQISYWAYWGQGTLVTVSSGGGGSGGGGSGGGGSQTVVTQEPSLTVSPGGTVTLTCGSSTGAVTDGNYPNWVQQKPGQAPRGLIGGIKFLAPGTPARFSGSLLGGKAALTLSGVQPEDEAEYYCVLWYSNRWVFGGGTKLTVL

SEQ ID NO: 3161 - protein, 249 aa, synthetic construct
  REGION 1..249: note = Description of Artificial Sequence: Synthetic polypeptide
EVQLVESGGGLVQPGGSLKLSCAASGFTFNKYAVNWVRQAPGKGLEWVARIRSKYNNYATYYADSVKDRFTISRDDSKNTAYLQMNNLKTEDTAVYYCVRHGNFGNSYISYWAYWGQGTLVTVSSGGGGSGGGGSGGGGSQTVVTQEPSLTVSPGGTVTLTCGESTGAVTSGNYPNWVQQKPGQAPRGLIGGTKILAPGTPARFSGSLLGGKAALTLSGVQPEDEAEYYCVLWYSNRWVFGGGTKLTVL

SEQ ID NO: 3162 - protein, 249 aa, synthetic construct
  REGION 1..249: note = Description of Artificial Sequence: Synthetic polypeptide
EVQLVESGGGLVQPGGSLKLSCAASGFTFNKYPMNWVRQAPGKGLEWVARIRSKYNNYATYYADSVKDRFTISRDDSKNTAYLQMNNLKNEDTAVYYCVRHGNFNNSYISYWAYWGQGTLVTVSSGGGGSGGGGSGGGGSQTVVTQEPSLTVSPGGTVTLTCGSSTGAVTKGNYPNWVQQKPGQAPRGLIGGTKMLAPGTPARFSGSLLGGKAALTLSGVQPEDEAEYYCALWYSNRWVFGGGTKLTVL

SEQ ID NO: 3163 - protein, 249 aa, synthetic construct
  REGION 1..249: note = Description of Artificial Sequence: Synthetic polypeptide
EVQLVESGGGLVQPGGSLKLSCAASGFTFNGYAMNWVRQAPGKGLEWVARIRSKYNNYATYYADEVKDRFTISRDDSKNTAYLQMNNLKTEDTAVYYCVRHGNFGNSPISYWAYWGQGTLVTVSSGGGGSGGGGSGGGGSQTVVTQEPSLTVSPGGTVTLTCGSSTGAVVSGNYPNWVQQKPGQAPRGLIGGTEFLAPGTPARFSGSLLGGKAALTLSGVQPEDEAEYYCVLWYSNRWVFGGGTKLTVL

SEQ ID NO: 3164 - protein, 249 aa, synthetic construct
  REGION 1..249: note = Description of Artificial Sequence: Synthetic polypeptide
EVQLVESGGGLVQPGGSLKLSCAASGNTFNKYAMNWVRQAPGKGLEWVARIRSKYNNYATYYADSVKDRFTISRDDSKNTAYLQMNNLKTEDTAVYYCVRHGNFGDSYISYWAYWGQGTLVTVSSGGGGSGGGGSGGGGSQTVVTQEPSLTVSPGGTVTLTCGSSTGAVTHGNYPNWVQQKPGQAPRGLIGGTKVLAPGTPARFSGSLLGGKAALTLSGVQPEDEAEYYCVLWYSNRWVFGGGTKLTVL

SEQ ID NO: 3165 - protein, 249 aa, synthetic construct
  REGION 1..249: note = Description of Artificial Sequence: Synthetic polypeptide
EVQLVESGGGLVQPGGSLKLSCAASGFTFNNYAMNWVRQAPGKGLEWVARIRSGYNNYATYYADSVKDRFTISRDDSKNTAYLQMNNLKTEDTAVYYCVRHGNFGNSYISYWAYWGQGTLVTVSSGGGGSGGGGSGGGGSQTVVTQEPSLTVSPGGTVTLTCGSYTGAVTSGNYPNWVQQKPGQAPRGLIGGTKFNAPGTPARFSGSLLGGKAALTLSGVQPEDEAEYYCVLWYANRWVFGGGTKLTVL

SEQ ID NO: 3166 - protein, 249 aa, synthetic construct
  REGION 1..249: note = Description of Artificial Sequence: Synthetic polypeptide
EVQLVESGGGLVQPGGSLKLSCAASGFEFNKYAMNWVRQAPGKGLEWVARIRSKYNNYETYYADSVKDRFTISRDDSKNTAYLQMNNLKTEDTAVYYCVRHGNFGNSLISYWAYWGQGTLVTVSSGGGGSGGGGSGGGGSQTVVTQEPSLTVSPGGTVTLTCGSSSGAVTSGNYPNWVQQKPGQAPRGLIGGTKFGAPGTPARFSGSLLGGKAALTLSGVQPEDEAEYYCVLWYSNRWVFGGGTKLTVL

SEQ ID NO: 3167 - protein, 249 aa, synthetic construct
  REGION 1..249: note = Description of Artificial Sequence: Synthetic polypeptide
EVQLVESGGGLVQPGGSLKLSCAASGFTFNKYAMNWVRQAPGKGLEWVARIRSKYNNYATYYADSVKDRFTISRDDSKNTAYLQMNNLKTEDTAVYYCVRHGNFGNSYISYWAYWGQGTLVTVSSGGGGSGGGGSGGGGSQTVVTQEPSLTVSPGGTVTLTCGSSTGAVTSGNYPNWVQQKPGQAPRGLIGGTKFLAPGTPARFSGSLLGGKAALTLSGVQPEDEAEYYCVLWYSNRWVFGGGTKLTVL

SEQ ID NO: 3168 - protein, 249 aa, synthetic construct
  REGION 1..249: note = Description of Artificial Sequence: Synthetic polypeptide
EVQLVESGGGLVQPGGSLKLSCAASGFTFNKYALNWVRQAPGKGLEWVARIRSKYNNYATEYADSVKDRFTISRDDSKNTAYLQMNNLKTEDTAVYYCVRHGNFGNSPISYWAYWGQGTLVTVSSGGGGSGGGGSGGGGSQTVVTQEPSLTVSPGGTVTLTCGSSTGAVTSGNYPNWVQQKPGQAPRGLIGGTNFLAPGTPERFSGSLLGGKAALTLSGVQPEDEAEYYCVLWYSNRWAFGGGTKLTVL

SEQ ID NO: 3169 - protein, 249 aa, synthetic construct
  REGION 1..249: note = Description of Artificial Sequence: Synthetic polypeptide
EVQLVESGGGLVQPGGSLKLSCAASGFTFNEYAMNWVRQAPGKGLEWVARIRSKYNNYATYYADDVKDRFTISRDDSKNTAYLQMNNLKTEDTAVYYCVRHGNFGNSGISYWAYWGQGTLVTVSSGGGGSGGGGSGGGGSQTVVTQEPSLTVSPGGTVTLTCGSSTGAVTVGNYPNWVQQKPGQAPRGLIGGTEFLAPGTPARFSGSLLGGKAALTLSGVQPEDEAEYYCVLWYSNRWVFGGGTKLTVL

SEQ ID NO: 3170 - protein, 10 aa, synthetic construct
  REGION 1..10: note = Description of Artificial Sequence: Synthetic peptide
GFTFSSFGMS

SEQ ID NO: 3171 - protein, 16 aa, synthetic construct
  REGION 1..16: note = Description of Artificial Sequence: Synthetic peptide
SISGSGSDTLYADSVK

SEQ ID NO: 3172 - protein, 6 aa, synthetic construct
  REGION 1..6: note = Description of Artificial Sequence: Synthetic peptide
GGSLSR

SEQ ID NO: 3173 - protein, 10 aa, synthetic construct
  REGION 1..10: note = Description of Artificial Sequence: Synthetic peptide
GFTFSRFGMS

SEQ ID NO: 3174 - protein, 10 aa, synthetic construct
  REGION 1..10: note = Description of Artificial Sequence: Synthetic peptide
GFTFSKFGMS

SEQ ID NO: 3175 - protein, 10 aa, synthetic construct
  REGION 1..10: note = Description of Artificial Sequence: Synthetic peptide
GFTYSSFGMS

SEQ ID NO: 3176 - protein, 16 aa, synthetic construct
  REGION 1..16: note = Description of Artificial Sequence: Synthetic peptide
SISGSGADTLYADSLK

SEQ ID NO: 3177 - protein, 16 aa, synthetic construct
  REGION 1..16: note = Description of Artificial Sequence: Synthetic peptide
SISGSGTDTLYADSVK

SEQ ID NO: 3178 - protein, 16 aa, synthetic construct
  REGION 1..16: note = Description of Artificial Sequence: Synthetic peptide
SISGSGRDTLYADSVK

SEQ ID NO: 3179 - protein, 16 aa, synthetic construct
  REGION 1..16: note = Description of Artificial Sequence: Synthetic peptide
SISGSGSDTLYAESVK

SEQ ID NO: 3180 - protein, 16 aa, synthetic construct
  REGION 1..16: note = Description of Artificial Sequence: Synthetic peptide
SISGSGTDTLYAESVK

SEQ ID NO: 3181 - protein, 16 aa, synthetic construct
  REGION 1..16: note = Description of Artificial Sequence: Synthetic peptide
SISGSGRDTLYAESVK

SEQ ID NO: 3182 - protein, 6 aa, synthetic construct
  REGION 1..6: note = Description of Artificial Sequence: Synthetic peptide
GGSLSK

SEQ ID NO: 3183 - protein, 6 aa, synthetic construct
  REGION 1..6: note = Description of Artificial Sequence: Synthetic peptide
GGSLSV

SEQ ID NO: 3184 - protein, 115 aa, synthetic construct [sequence omitted]

SEQ ID NO: 3185 - protein, 115 aa, synthetic construct
  REGION 1..115: note = Description of Artificial Sequence: Synthetic polypeptide
EVQLVESGGGLVQPGNSLRLSCAASGFTFSRFGMSWVRQAPGKGLEWVSSISGSGSDTLYADSVKGRFTISRDNAKTTLYLQMNSLRPEDTAVYYCTIGGSLSRSSQGTLVTVSS

SEQ ID NO: 3186 - protein, 115 aa, synthetic construct
  REGION 1..115: note = Description of Artificial Sequence: Synthetic polypeptide
EVQLVESGGGLVQPGNSLRLSCAASGFTFSKFGMSWVRQAPGKGLEWVSSISGSGADTLYADSLKGRFTISRDNAKTTLYLQMNSLRPEDTAVYYCTIGGSLSKSSQGTLVTVSS

SEQ ID NO: 3187 - protein, 115 aa, synthetic construct
  REGION 1..115: note = Description of Artificial Sequence: Synthetic polypeptide
EVQLVESGGGLVQPGNSLRLSCAASGFTYSSFGMSWVRQAPGKGLEWVSSISGSGSDTLYADSVKGRFTISRDNAKTTLYLQMNSLRPEDTAVYYCTIGGSLSKSSQGTLVTVSS

SEQ ID NO: 3188 - protein, 115 aa, synthetic construct
  REGION 1..115: note = Description of Artificial Sequence: Synthetic polypeptide
EVQLVESGGGLVQPGNSLRLSCAASGFTFSKFGMSWVRQAPGKGLEWVSSISGSGTDTLYADSVKGRFTISRDNAKTTLYLQMNSLRPEDTAVYYCTIGGSLSRSSQGTLVTVSS

SEQ ID NO: 3189 - protein, 115 aa, synthetic construct
  REGION 1..115: note = Description of Artificial Sequence: Synthetic polypeptide
EVQLVESGGGLVQPGNSLRLSCAASGFTFSRFGMSWVRQAPGKGLEWVSSISGSGSDTLYADSVKGRFTISRDNAKTTLYLQMNSLRPEDTAVYYCTIGGSLSKSSQGTLVTVSS

SEQ ID NO: 3190 - protein, 115 aa, synthetic construct
  REGION 1..115: note = Description of Artificial Sequence: Synthetic polypeptide
EVQLVESGGGLVQPGNSLRLSCAASGFTFSKFGMSWVRQAPGKGLEWVSSISGSGRDTLYADSVKGRFTISRDNAKTTLYLQMNSLRPEDTAVYYCTIGGSLSVSSQGTLVTVSS

SEQ ID NO: 3191 - protein, 115 aa, synthetic construct
  REGION 1..115: note = Description of Artificial Sequence: Synthetic polypeptide
EVQLVESGGGLVQPGNSLRLSCAASGFTFSRFGMSWVRQAPGKGLEWVSSISGSGSDTLYAESVKGRFTISRDNAKTTLYLQMNSLRPEDTAVYYCTIGGSLSRSSQGTLVTVSS

SEQ ID NO: 3192 - protein, 115 aa, synthetic construct
  REGION 1..115: note = Description of Artificial Sequence: Synthetic polypeptide
EVQLVESGGGLVQPGNSLRLSCAASGFTFSKFGMSWVRQAPGKGLEWVSSISGSGTDTLYAESVKGRFTISRDNAKTTLYLQMNSLRPEDTAVYYCTIGGSLSRSSQGTLVTVSS

SEQ ID NO: 3193 - protein, 115 aa, synthetic construct
  REGION 1..115: note = Description of Artificial Sequence: Synthetic polypeptide
EVQLVESGGGLVQPGNSLRLSCAASGFTFSKFGMSWVRQAPGKGLEWVSSISGSGRDTLYAESVKGRFTISRDNAKTTLYLQMNSLRPEDTAVYYCTIGGSLSVSSQGTLVTVSS

SEQ ID NO: 3194 - protein, 50 aa, synthetic construct
  REGION 1..50: note = Description of Artificial Sequence: Synthetic polypeptide
  VARIANT 1..50: note = SITE - This sequence may encompass 1-10 "Gly Gly Ser Gly Gly" repeating units
GGSGGGGSGGGGSGGGGSGGGGSGGGGSGGGGSGGGGSGGGGSGGGGSGG

SEQ ID NO: 3195 - protein, 50 aa, synthetic construct
  REGION 1..50: note = Description of Artificial Sequence: Synthetic polypeptide
  VARIANT 1..50: note = SITE - This sequence may encompass 1-10 "Gly Gly Gly Gly Ser" repeating units
GGGGSGGGGSGGGGSGGGGSGGGGSGGGGSGGGGSGGGGSGGGGSGGGGS

SEQ ID NO: 3196 - protein, 50 aa, synthetic construct
  REGION 1..50: note = Description of Artificial Sequence: Synthetic polypeptide
  VARIANT 1..50: note = SITE - This sequence may encompass 1-10 "Gly Gly Gly Gly Gly" repeating units
GGGGGGGGGGGGGGGGGGGGGGGGGGGGGGGGGGGGGGGGGGGGGGGGGG

SEQ ID NO: 3197 - protein, 30 aa, synthetic construct
  REGION 1..30: note = Description of Artificial Sequence: Synthetic polypeptide
  VARIANT 1..30: note = SITE - This sequence may encompass 1-10 "Gly Gly Gly" repeating units
GGGGGGGGGGGGGGGGGGGGGGGGGGGGGG

SEQ ID NO: 3198 - protein, 20 aa, synthetic construct
  REGION 1..20: note = Description of Artificial Sequence: Synthetic peptide
GGGGSGGGGSGGGGSGGGGS

SEQ ID NO: 3199 - protein, 15 aa, synthetic construct
  REGION 1..15: note = Description of Artificial Sequence: Synthetic peptide
GGGGSGGGGSGGGGS

SEQ ID NO: 3200 - protein, 5 aa, synthetic construct
  REGION 1..5: note = Description of Artificial Sequence: Synthetic peptide
LPETG

SEQ ID NO: 3201 - protein, 184 aa, Homo sapiens
MLQMAGQCSQNEYFDSLLHACIPCQLRCSSNTPPLTCQRYCNASVTNSVKGTNAILWTCLGLSLIISLAVFVLMFLLRKINSEPLKDEFKNTGSGLLGMANIDLEKSRTGDEIILPRGLEYTVEECTCEDCIKSKPKVDSDHCFPLPAMEEGATILVTTKTNDYCKSLPAALSATEIEKSISAR

SEQ ID NO: 3202 - protein, 185 aa, Mus musculus
MAQQCFHSEYFDSLLHACKPCHLRCSNPPATCQPYCDPSVTSSVKGTYTVLWIFLGLTLVLSLALFTISFLLRKMNPEALKDEPQSPGQLDGSAQLDKADTELTRIRAGDDRIFPRSLEYTVEECTCEDCVKSKPKGDSDHFFPLPAMEEGATILVTTKTGDYGKSSVPTALQSVMGMEKPTHTR

SEQ ID NO: 3203 - protein, 183 aa, Macaca fascicularis
MLQMARQCSQNEYFDSLLHDCKPCQLRCSSTPPLTCQRYCNASMTNSVKGMNAILWTCLGLSLIISLAVFVLTFLLRKMSSEPLKDEFKNTGSGLLGMANIDLEKGRTGDEIVLPRGLEYTVEECTCEDCIKNKPKVDSDHCFPLPAMEEGATILVTTKTNDYCNSLSAALSVTEIEKSISAR

SEQ ID NO: 3204 - protein, 630 aa, unidentified
  REGION 1..630: note = Description of Unknown: Mesothelin peptide sequence
MALPTARPLLGSCGTPALGSLLFLLFSLGWVQPSRTLAGETGQEAAPLDGVLANPPNISSLSPRQLLGFPCAEVSGLSTERVRELAVALAQKNVKLSTEQLRCLAHRLSEPPEDLDALPLDLLLFLNPDAFSGPQACTRFFSRITKANVDLLPRGAPERQRLLPAALACWGVRGSLLSEADVRALGGLACDLPGRFVAESAEVLLPRLVSCPGPLDQDQQEAARAALQGGGPPYGPPSTWSVSTMDALRGLLPVLGQPIIRSIPQGIVAAWRQRSSRDPSWRQPERTILRPRFRREVEKTACPSGKKAREIDESLIFYKKWELEACVDAALLATQMDRVNAIPFTYEQLDVLKHKLDELYPQGYPESVIQHLGYLFLKMSPEDIRKWNVTSLETLKALLEVNKGHEMSPQAPRRPLPQVATLIDRFVKGRGQLDKDTLDTLTAFYPGYLCSLSPEELSSVPPSSIWAVRPQDLDTCDPRQLDVLYPKARLAFQNMNGSEYFVKIQSFLGGAPTEDLKALSQQNVSMDLATFMKLRTDAVLPLTVAEVQKLLGPHVEGLKAEERHRPVRDWILRQRQDDLDTLGLGLQGGIPNGYLVLDLSMQEALSGTPCLLGPGPVLTVLALLLASTLA

SEQ ID NO: 3205 - protein, 1091 aa, Homo sapiens
MRPSGTAGAALLALLAALCPASRALEEKKVCQGTSNKLTQLGTFEDHFLSLQRMFNNCEVVLGNLEITYVQRNYDLSFLKTIQEVAGYVLIALNTVERIPLENLQIIRGNMYYENSYALAVLSNYDANKTGLKELPMRNLQGQKCDPSCPNGSCWGAGEENCQKLTKIICAQQCSGRCRGKSPSDCCHNQCAAGCTGPRESDCLVCRKFRDEATCKDTCPPLMLYNPTTYQMDVNPEGKYSFGATCVKKCPRNYVVTDHGSCVRACGADSYEMEEDGVRKCKKCEGPCRKVCNGIGIGEFKDSLSINATNIKHFKNCTSISGDLHILPVAFRGDSFTHTPPLDPQELDILKTVKEITGFLLIQAWPENRTDLHAFENLEIIRGRTKQHGQFSLAVVSLNITSLGLRSLKEISDGDVIISGNKNLCYANTINWKKLFGTSGQKTKIISNRGENSCKATGQVCHALCSPEGCWGPEPRDCVSCRNVSRGRECVDKCNLLEGEPREFVENSECIQCHPECLPQAMNITCTGRGPDNCIQCAHYIDGPHCVKTCPAGVMGENNTLVWKYADAGHVCHLCHPNCTYGCTGPGLEGCPTNGPKIPSIATGMVGALLLLLVVALGIGLFMRRRHIVRKRTLRRLLQERELVEPLTPSGEAPNQALLRILKETEFKKIKVLGSGAFGTVYKGLWIPEGEKVKIPVAIKELREATSPKANKEILDEAYVMASVDNPHVCRLLGICLTSTVQLITQLMPFGCLLDYVREHKDNIGSQYLLNWCVQIAKGMNYLEDRRLVHRDLAARNVLVKTPQHVKITDFGLAKLLGAEEKEYHAEGGKVPIKWMALESILHRIYTHQSDVWSYGVTVWELMTFGSKPYDGIPASEISSILEKGERLPQPPICTIDVYMIMVKCWMIDADSRPKFRELIIEFSKMARDPQRYLVIQGDERMHLPSPTDSNFYRALMDEEDMDDVVDADEYLIPQQGFFSSPSTSRTPLLSSLSATSNNSTVACIDRNGLQSCPIKEDSFLQRYSSDPTGALTEDSIDDTFLPVPGEWLVWKQSCSSTSSTHSAAASLQCPSQVLPPASPEGETVADLQTQ

SEQ ID NO: 3206 - protein, 1210 aa, Mus musculus
MRPSGTARTTLLVLLTALCAAGGALEEKKVCQGTSNRLTQLGTFEDHFLSLQRMYNNCEVVLGNLEITYVQRNYDLSFLKTIQEVAGYVLIALNTVERIPLENLQIIRGNALYENTYALAILSNYGTNRTGLRELPMRNLQEILIGAVRFSNNPILCNMDTIQWRDIVQNVFMSNMSMDLQSHPSSCPKCDPSCPNGSCWGGGEENCQKLTKIICAQQCSHRCRGRSPSDCCHNQCAAGCTGPRESDCLVCQKFQDEATCKDTCPPLMLYNPTTYQMDVNPEGKYSFGATCVKKCPRNYVVTDHGSCVRACGPDYYEVEEDGIRKCKKCDGPCRKVCNGIGIGEFKDTLSINATNIKHFKYCTAISGDLHILPVAFKGDSFTRTPPLDPRELEILKTVKEITGFLLIQAWPDNWTDLHAFENLEIIRGRTKQHGQFSLAVVGLNITSLGLRSLKEISDGDVIISGNRNLCYANTINWKKLFGTPNQKTKIMNNRAEKDCKAVNHVCNPLCSSEGCWGPEPRDCVSCQNVSRGRECVEKCNILEGEPREFVENSECIQCHPECLPQAMNITCTGRGPDNCIQCAHYIDGPHCVKTCPAGIMGENNTLVWKYADANNVCHLCHANCTYGCAGPGLQGCEVWPSGPKIPSIATGIVGGLLFIVVVALGIGLFMRRRHIVRKRTLRRLLQERELVEPLTPSGEAPNQAHLRILKETEFKKIKVLGSGAFGTVYKGLWIPEGEKVKIPVAIKELREATSPKANKEILDEAYVMASVDNPHVCRLLGICLTSTVQLITQLMPYGCLLDYVREHKDNIGSQYLLNWCVQIAKGMNYLEDRRLVHRDLAARNVLVKTPQHVKITDFGLAKLLGAEEKEYHAEGGKVPIKWMALESILHRIYTHQSDVWSYGVTVWELMTFGSKPYDGIPASDISSILEKGERLPQPPICTIDVYMIMVKCWMIDADSRPKFRELILEFSKMARDPQRYLVIQGDERMHLPSPTDSNFYRALMDEEDMEDVVDADEYLIPQQGFFNSPSTSRTPLLSSLSATSNNSTVACINRNGSCRVKEDAFLQRYSSDPTGAVTEDNIDDAFLPVPEYVNQSVPKRPAGSVQNPVYHNQPLHPAPGRDLHYQNPHSNAVGNPEYLNTAQPTCLSSGFNSPALWIQKGSHQMSLDNPDYQQDFFPKETKPNGIFKGPTAENAEYLRVAPPSSEFIGA

SEQ ID NO: 3207 - protein, 1210 aa, Macaca fascicularis
MRPSGTAGAALLALLAALCPASRALEEKKVCQGTSNKLTQLGTFEDHFLSLQRMFNNCEVVLGNLEITYVQRNYDLSFLKTIQEVAGYVLIALNTVERIPLENLQIIRGNMYYENSYALAVLSNYDANKTGLKELPMRNLQEILHGAVRFSNNPALCNVESIQWRDIVSSEFLSNMSMDFQNHLGSCQKCDPSCPNGSCWGAGEENCQKLTKIICAQQCSGRCRGKSPSDCCHNQCAAGCTGPRESDCLVCRKFRDEATCKDTCPPLMLYNPTTYQMDVNPEGKYSFGATCVKKCPRNYVVTDHGSCVRACGADSYEMEEDGVRKCKKCEGPCRKVCNGIGIGEFKDTLSINATNIKHFKNCTSISGDLHILPVAFRGDSFTHTPPLDPQELDILKTVKEITGFLLIQAWPENRTDLHAFENLEIIRGRTKQHGQFSLAVVSLNITSLGLRSLKEISDGDVIISGNKNLCYANTINWKKLFGTSSQKTKIISNRGENSCKATGQVCHALCSPEGCWGPEPRDCVSCQNVSRGRECVDKCNILEGEPREFVENSECIQCHPECLPQVMNITCTGRGPDNCIQCAHYIDGPHCVKTCPAGVMGENNTLVWKYADAGHVCHLCHPNCTYGCTGPGLEGCARNGPKIPSIATGMVGALLLLLVVALGIGLFMRRRHIVRKRTLRRLLQERELVEPLTPSGEAPNQALLRILKETEFKKIKVLGSGAFGTVYKGLWIPEGEKVKIPVAIKELREATSPKANKEILDEAYVMASVDNPHVCRLLGICLTSTVQLITQLMPFGCLLDYVREHKDNIGSQYLLNWCVQIAKGMNYLEDRRLVHRDLAARNVLVKTPQHVKITDFGLAKLLGAEEKEYHAEGGKVPIKWMALESILHRIYTHQSDVWSYGVTVWELMTFGSKPYDGIPASEISSILEKGERLPQPPICTIDVYMIMVKCWMIDADSRPKFRELIIEFSKMARDPQRYLVIQGDERMHLPSPTDSNFYRALMDEEDMDDVVDADEYLIPQQGFFSSPSTSRTPLLSSLSATSNNSTVACIDRNGLQSCPIKEDSFLQRYSSDPTGALTEDSIDDTFLPVPEYINQSVPKRPAGSVQNPVYHNQPLNPAPSRDPHYQDPHSTAVGNPEYLNTVQPTCVNSTFDSPAHWAQKGSHQISLDNPDYQQDFFPKEAKPNGIFKGSTAENAEYLRVAPQSSEFIGA

SEQ ID NO: 3208 - protein, 342 aa, Homo sapiens
METKHLGRGGAGRAGPHLWRGPRPNCSAGAGGGEPTHSPNSRAVTHQRAPAARECVCENYKLAVNCFVNNNRQCQCTSVGAQNTVICSKLAAKCLVMKAEMNGSKLGRRAKPEGALQNNDGLYDPDCDESGLFKAKQCNGTSMCWCVNTAGVRRTDKDTEITCSERVRTYWIIIELKHKAREKPYDSKSLRTALQKEITTRYQLDPKFITSILYENNVITIDLVQNSSQKTQNDVDIADVAYYFEKDVKGESLFHSKKMDLTVNGEQLDLDPGQTLIYYVDEKAPEFSMQGLKAGVIAVIVVVVIAVVAGIVVLVISRKKRMAKYEKAEIKEMGEMHRELNA

SEQ ID NO: 3209 - protein, 288 aa, Macaca fascicularis
CVCENYKLAVNCFLNDNGQCQCTSIGAQNTVLCSKLAAKCLVMKAEMNGSKLGRRAKPEGALQNNDGLYDPDCDESGLFKAKQCNGTSTCWCVNTAGVRRTDKDTEITCSERVRTYWIIIELKHKAREKPYDVQSLRTALEEAIKTRYQLDPKFITNILYEDNVITIDLVQNSSQKTQNDVDIADVAYYFEKDVKGESLFHSKKMDLRVNGEQLDLDPGQTLIYYVDEKAPEFSMQGLKAGVIAVIVVVVIAIVAGIVVLVISRKKRMAKYEKAEIKEMGEIHRELNA

SEQ ID NO: 3210 - protein, 315 aa, Mus musculus
MAGPQALAFGLLLAVVTATLAAAQRDCVCDNYKLATSCSLNEYGECQCTSYGTQNTVICSKLASKCLAMKAEMTHSKSGRRIKPEGAIQNNDGLYDPDCDEQGLFKAKQCNGTATCWCVNTAGVRRTDKDTEITCSERVRTYWIIIELKHKERESPYDHQSLQTALQEAFTSRYKLNQKFIKNIMYENNVITIDLMQNSSQKTQDDVDIADVAYYFEKDVKGESLFHSSKSMDLRVNGEPLDLDPGQTLIYYVDEKAPEFSMQGLTAGIIAVIVVVSLAVIAGIVVLVISTRKKSAKYEKAEIKEMGEIHRELNA

SEQ ID NO: 3211 - protein, 314 aa, Homo sapiens
MAPPQVLAFGLLLAAATATFAAAQEECVCENYKLAVNCFVNNNRQCQCTSVGAQNTVICSKLAAKCLVMKAEMNGSKLGRRAKPEGALQNNDGLYDPDCDESGLFKAKQCNGTSMCWCVNTAGVRRTDKDTEITCSERVRTYWIIIELKHKAREKPYDSKSLRTALQKEITTRYQLDPKFITSILYENNVITIDLVQNSSQKTQNDVDIADVAYYFEKDVKGESLFHSKKMDLTVNGEQLDLDPGQTLIYYVDEKAPEFSMQGLKAGVIAVIVVVVIAVVAGIVVLVISRKKRMAKYEKAEIKEMGEMHRELNA

SEQ ID NO: 3212 - protein, 242 aa, Homo sapiens
QEECVCENYKLAVNCFVNNNRQCQCTSVGAQNTVICSKLAAKCLVMKAEMNGSKLGRRAKPEGALQNNDGLYDPDCDESGLFKAKQCNGTSMCWCVNTAGVRRTDKDTEITCSERVRTYWIIIELKHKAREKPYDSKSLRTALQKEITTRYQLDPKFITSILYENNVITIDLVQNSSQKTQNDVDIADVAYYFEKDVKGESLFHSKKMDLTVNGEQLDLDPGQTLIYYVDEKAPEFSMQGLK

SEQ ID NO: 3213 - protein, 242 aa, Macaca fascicularis
QKECVCENYKLAVNCFLNDNGQCQCTSIGAQNTVLCSKLAAKCLVMKAEMNGSKLGRRAKPEGALQNNDGLYDPDCDESGLFKAKQCNGTSTCWCVNTAGVRRTDKDTEITCSERVRTYWIIIELKHKAREKPYDVQSLRTALEEAIKTRYQLDPKFITNILYEDNVITIDLVQNSSQKTQNDVDIADVAYYFEKDVKGESLFHSKKMDLRVNGEQLDLDPGQTLIYYVDEKAPEFSMQGLK

SEQ ID NO: 3214 - protein, 243 aa, Mus musculus
QRDCVCDNYKLATSCSLNEYGECQCTSYGTQNTVICSKLASKCLAMKAEMTHSKSGRRIKPEGAIQNNDGLYDPDCDEQGLFKAKQCNGTATCWCVNTAGVRRTDKDTEITCSERVRTYWIIIELKHKERESPYDHQSLQTALQEAFTSRYKLNQKFIKNIMYENNVITIDLMQNSSQKTQDDVDIADVAYYFEKDVKGESLFHSSKSMDLRVNGEPLDLDPGQTLIYYVDEKAPEFSMQGLT

SEQ ID NO: 3215 - protein, 993 aa, Homo sapiens
MPALARDGGQLPLLVVFSAMIFGTITNQDLPVIKCVLINHKNNDSSVGKSSSYPMVSESPEDLGCALRPQSSGTVYEAAAVEVDVSASITLQVLVDAPGNISCLWVFKHSSLNCQPHFDLQNRGVVSMVILKMTETQAGEYLLFIQSEATNYTILFTVSIRNTLLYTLRRPYFRKMENQDALVCISESVPEPIVEWVLCDSQGESCKEESPAVVKKEEKVLHELFGTDIRCCARNELGRECTRLFTIDLNQTPQTTLPQLFLKVGEPLWIRCKAVHVNHGFGLTWELENKALEEGNYFEMSTYSTNRTMIRILFAFVSSVARNDTGYYTCSSSKHPSQSALVTIVEKGFINATNSSEDYEIDQYEEFCFSVRFKAYPQIRCTWTFSRKSFPCEQKGLDNGYSISKFCNHKHQPGEYIFHAENDDAQFTKMFTLNIRRKPQVLAEASASQASCFSDGYPLPSWTWKKCSDKSPNCTEEITEGVWNRKANRKVFGQWVSSSTLNMSEAIKGFLVKCCAYNSLGTSCETILLNSPGPFPFIQDNISFYATIGVCLLFIVVLTLLICHKYKKQFRYESQLQMVQVTGSSDNEYFYVDFREYEYDLKWEFPRENLEFGKVLGSGAFGKVMNATAYGISKTGVSIQVAVKMLKEKADSSEREALMSELKMMTQLGSHENIVNLLGACTLSGPIYLIFEYCCYGDLLNYLRSKREKFHRTWTEIFKEHNFSFYPTFQSHPNSSMPGSREVQIHPDSDQISGLHGNSFHSEDEIEYENQKRLEEEEDLNVLTFEDLLCFAYQVAKGMEFLEFKSCVHRDLAARNVLVTHGKVVKICDFGLARDIMSDSNYVVRGNARLPVKWMAPESLFEGIYTIKSDVWSYGILLWEIFSLGVNPYPGIPVDANFYKLIQNGFKMDQPFYATEEIYIIMQSCWAFDSRKRPSFPNLTSFLGCQLADAEEAMYQNVDGRVSECPHTYQNRRPFSREMDLGLLSPQAQVEDS

SEQ ID NO: 3216 - protein, 618 aa, Homo sapiens
MVSPRMSGLLSQTVILALIFLPQTRPAGVFELQIHSFGPGPGPGAPRSPCSARLPCRLFFRVCLKPGLSEEAAESPCALGAALSARGPVYTEQPGAPAPDLPLPDGLLQVPFRDAWPGTFSFIIETWREELGDQIGGPAWSLLARVAGRRRLAAGGPWARDIQRAGAWELRFSYRARCEPPAVGTACTRLCRPRSAPSRCGPGLRPCAPLEDECEAPLVCRAGCSPEHGFCEQPGECRCLEGWTGPLCTVPVSTSSCLSPRGPSSATTGCLVPGPGPCDGNPCANGGSCSETPRSFECTCPRGFYGLRCEVSGVTCADGPCFNGGLCVGGADPDSAYICHCPPGFQGSNCEKRVDRCSLQPCRNGGLCLDLGHALRCRCRAGFAGPRCEHDLDDCAGRACANGGTCVEGGGAHRCSCALGFGGRDCRERADPCAARPCAHGGRCYAHFSGLVCACAPGYMGARCEFPVHPDGASALPAAPPGLRPGDPQRYLLPPALGLLVAAGVAGAALLLVHVRRRGHSQDAGSRLLAGTPEPSVHALPDALNNLRTQEGSGDGPSSSVDWNRPEDVDPQGIYVISAPSIYAREVATPLFPPLHTGRAGQRQHLLFPYPSSILSVK

SEQ ID NO: 3217 - protein, 446 aa, Homo sapiens
RSPCSARLPCRLFFRVCLKPGLSEEAAESPCALGAALSARGPVYTEQPGAPAPDLPLPDGLLQVPFRDAWPGTFSFIIETWREELGDQIGGPAWSLLARVAGRRRLAAGGPWARDIQRAGAWELRFSYRARCEPPAVGTACTRLCRPRSAPSRCGPGLRPCAPLEDECEAPLVCRAGCSPEHGFCEQPGECRCLEGWTGPLCTVPVSTSSCLSPRGPSSATTGCLVPGPGPCDGNPCANGGSCSETPRSFECTCPRGFYGLRCEVSGVTCADGPCFNGGLCVGGADPDSAYICHCPPGFQGSNCEKRVDRCSLQPCRNGGLCLDLGHALRCRCRAGFAGPRCEHDLDDCAGRACANGGTCVEGGGAHRCSCALGFGGRDCRERADPCAARPCAHGGRCYAHFSGLVCACAPGYMGARCEFPVHPDGASALPAAPPGLRPGDPQRYL

SEQ ID NO: 3218 - protein, 507 aa, synthetic construct
  REGION 1..507: note = Description of Artificial Sequence: Synthetic polypeptide
EVQLVESGGGLVQPGRSLTLSCAASTNIFSISPMGWYRQAPGKQRELVAAIHGFSTLYADSVKGRFTISRDNAKNSIYLQMNSLRPEDTALYYCNKVPWGDYHPRNVYWGQGTQVTVSSGGGGSGGGSEVQLVESGGGLVQPGNSLRLSCAASGFTFSKFGMSWVRQAPGKGLEWVSSISGSGRDTLYADSVKGRFTISRDNAKTTLYLQMNSLRPEDTAVYYCTIGGSLSVSSQGTLVTVSSGGGGSGGGSEVQLVESGGGLVQPGGSLKLSCAASGFTFNKYAINWVRQAPGKGLEWVARIRSKYNNYATYYADQVKDRFTISRDDSKNTAYLQMNNLKTEDTAVYYCVRHANFGNSYISYWAYWGQGTLVTVSSGGGGSGGGGSGGGGSQTVVTQEPSLTVSPGGTVTLTCASSTGAVTSGNYPNWVQQKPGQAPRGLIGGTKFLVPGTPARFSGSLLGGKAALTLSGVQPEDEAEYYCTLWYSNRWVFGGGTKLTVLHHHHHH

SEQ ID NO: 3219 - protein, 507 aa, synthetic construct
  REGION 1..507: note = Description of Artificial Sequence: Synthetic polypeptide
EVQLVESGGGLVQPGRSLTLSCAASTDIFSISPMGWYRQAPGKQRELVAAIHGGSTLYADSVKGRFTISRDNAKNSIYLQMNSLRPEDTALYYCNKVPWGDYHPRNVAWGQGTQVTVSSGGGGSGGGSEVQLVESGGGLVQPGNSLRLSCAASGFTFSKFGMSWVRQAPGKGLEWVSSISGSGRDTLYADSVKGRFTISRDNAKTTLYLQMNSLRPEDTAVYYCTIGGSLSVSSQGTLVTVSSGGGGSGGGSEVQLVESGGGLVQPGGSLKLSCAASGFTFNKYAINWVRQAPGKGLEWVARIRSKYNNYATYYADQVKDRFTISRDDSKNTAYLQMNNLKTEDTAVYYCVRHANFGNSYISYWAYWGQGTLVTVSSGGGGSGGGGSGGGGSQTVVTQEPSLTVSPGGTVTLTCASSTGAVTSGNYPNWVQQKPGQAPRGLIGGTKFLVPGTPARFSGSLLGGKAALTLSGVQPEDEAEYYCTLWYSNRWVFGGGTKLTVLHHHHHH

SEQ ID NO: 3220 - protein, 507 aa, synthetic construct
  REGION 1..507: note = Description of Artificial Sequence: Synthetic polypeptide
EVQLVESGGGLVQPGRSLTLSCAASTNDFSISPMGWYRQAPGKQRELVAAIHGGSTLYADSVKGRFTISRDNAKNSIYLQMNSLRPEDTALYYCNKVPWGDYHPRNVAWGQGTQVTVSSGGGGSGGGSEVQLVESGGGLVQPGNSLRLSCAASGFTFSKFGMSWVRQAPGKGLEWVSSISGSGRDTLYADSVKGRFTISRDNAKTTLYLQMNSLRPEDTAVYYCTIGGSLSVSSQGTLVTVSSGGGGSGGGSEVQLVESGGGLVQPGGSLKLSCAASGFTFNKYAINWVRQAPGKGLEWVARIRSKYNNYATYYADQVKDRFTISRDDSKNTAYLQMNNLKTEDTAVYYCVRHANFGNSYISYWAYWGQGTLVTVSSGGGGSGGGGSGGGGSQTVVTQEPSLTVSPGGTVTLTCASSTGAVTSGNYPNWVQQKPGQAPRGLIGGTKFLVPGTPARFSGSLLGGKAALTLSGVQPEDEAEYYCTLWYSNRWVFGGGTKLTVLHHHHHH

SEQ ID NO: 3221 - protein, 507 aa, synthetic construct
  REGION 1..507: note = Description of Artificial Sequence: Synthetic polypeptide
EVQLVESGGGLVQPGRSLTLSCAASTNIFSKSPMGWYRQAPGKQRELVAAIHGKSTLYADSVKGRFTISRDNAKNSIYLQMNSLRPEDTALYYCNKVPWGDYHPRNVVWGQGTQVTVSSGGGGSGGGSEVQLVESGGGLVQPGNSLRLSCAASGFTFSKFGMSWVRQAPGKGLEWVSSISGSGRDTLYADSVKGRFTISRDNAKTTLYLQMNSLRPEDTAVYYCTIGGSLSVSSQGTLVTVSSGGGGSGGGSEVQLVESGGGLVQPGGSLKLSCAASGFTFNKYAINWVRQAPGKGLEWVARIRSKYNNYATYYADQVKDRFTISRDDSKNTAYLQMNNLKTEDTAVYYCVRHANFGNSYISYWAYWGQGTLVTVSSGGGGSGGGGSGGGGSQTVVTQEPSLTVSPGGTVTLTCASSTGAVTSGNYPNWVQQKPGQAPRGLIGGTKFLVPGTPARFSGSLLGGKAALTLSGVQPEDEAEYYCTLWYSNRWVFGGGTKLTVLHHHHHH

SEQ ID NO: 3222 - protein, 507 aa, synthetic construct
  REGION 1..507: note = Description of Artificial Sequence: Synthetic polypeptide
EVQLVESGGGLVQPGRSLTLSCAASTNDFSISPMGWYRQAPGKQRELVAAIHGKSTLYADSVKGRFTISRDNAKNSIYLQMNSLRPEDTALYYCNKVPWGDYHPRNVKWGQGTQVTVSSGGGGSGGGSEVQLVESGGGLVQPGNSLRLSCAASGFTFSKFGMSWVRQAPGKGLEWVSSISGSGRDTLYADSVKGRFTISRDNAKTTLYLQMNSLRPEDTAVYYCTIGGSLSVSSQGTLVTVSSGGGGSGGGSEVQLVESGGGLVQPGGSLKLSCAASGFTFNKYAINWVRQAPGKGLEWVARIRSKYNNYATYYADQVKDRFTISRDDSKNTAYLQMNNLKTEDTAVYYCVRHANFGNSYISYWAYWGQGTLVTVSSGGGGSGGGGSGGGGSQTVVTQEPSLTVSPGGTVTLTCASSTGAVTSGNYPNWVQQKPGQAPRGLIGGTKFLVPGTPARFSGSLLGGKAALTLSGVQPEDEAEYYCTLWYSNRWVFGGGTKLTVLHHHHHH

SEQ ID NO: 3223 - protein, 507 aa, synthetic construct
  REGION 1..507: note = Description of Artificial Sequence: Synthetic polypeptide
EVQLVESGGGLVQPGRSLTLSCAASTNQFSISPMGWYRQAPGKQRELVAAIHGKSTLYADSVKGRFTISRDNAKNSIYLQMNSLRPEDTALYYCNKVPWGDYHPRNVVWGQGTQVTVSSGGGGSGGGSEVQLVESGGGLVQPGNSLRLSCAASGFTFSKFGMSWVRQAPGKGLEWVSSISGSGRDTLYADSVKGRFTISRDNAKTTLYLQMNSLRPEDTAVYYCTIGGSLSVSSQGTLVTVSSGGGGSGGGSEVQLVESGGGLVQPGGSLKLSCAASGFTFNKYAINWVRQAPGKGLEWVARIRSKYNNYATYYADQVKDRFTISRDDSKNTAYLQMNNLKTEDTAVYYCVRHANFGNSYISYWAYWGQGTLVTVSSGGGGSGGGGSGGGGSQTVVTQEPSLTVSPGGTVTLTCASSTGAVTSGNYPNWVQQKPGQAPRGLIGGTKFLVPGTPARFSGSLLGGKAALTLSGVQPEDEAEYYCTLWYSNRWVFGGGTKLTVLHHHHHH

SEQ ID NO: 3224 - protein, 507 aa, synthetic construct
  REGION 1..507: note = Description of Artificial Sequence: Synthetic polypeptide
EVQLVESGGGLVQPGRSLTLSCAASTNIFSSSPMGWYRQAPGKQRELVAAINGFSTLYADSVKGRFTISRDNAKNSIYLQMNSLRPEDTALYYCNKVPWGDYHPRNVHWGQGTQVTVSSGGGGSGGGSEVQLVESGGGLVQPGNSLRLSCAASGFTFSKFGMSWVRQAPGKGLEWVSSISGSGRDTLYADSVKGRFTISRDNAKTTLYLQMNSLRPEDTAVYYCTIGGSLSVSSQGTLVTVSSGGGGSGGGSEVQLVESGGGLVQPGGSLKLSCAASGFTFNKYAINWVRQAPGKGLEWVARIRSKYNNYATYYADQVKDRFTISRDDSKNTAYLQMNNLKTEDTAVYYCVRHANFGNSYISYWAYWGQGTLVTVSSGGGGSGGGGSGGGGSQTVVTQEPSLTVSPGGTVTLTCASSTGAVTSGNYPNWVQQKPGQAPRGLIGGTKFLVPGTPARFSGSLLGGKAALTLSGVQPEDEAEYYCTLWYSNRWVFGGGTKLTVLHHHHHH

SEQ ID NO: 3225 - protein, 507 aa, synthetic construct
  REGION 1..507: note = Description of Artificial Sequence: Synthetic polypeptide
EVQLVESGGGLVQPGRSLTLSCAASTNIFSSSPMGWYRQAPGKQRELVAAIHGFSTLYADSVKGRFTISRDNAKNSIYLQMNSLRPEDTALYYCNKVPWGDYHPRNVYWGQGTQVTVSSGGGGSGGGSEVQLVESGGGLVQPGNSLRLSCAASGFTFSKFGMSWVRQAPGKGLEWVSSISGSGRDTLYADSVKGRFTISRDNAKTTLYLQMNSLRPEDTAVYYCTIGGSLSVSSQGTLVTVSSGGGGSGGGSEVQLVESGGGLVQPGGSLKLSCAASGFTFNKYAINWVRQAPGKGLEWVARIRSKYNNYATYYADQVKDRFTISRDDSKNTAYLQMNNLKTEDTAVYYCVRHANFGNSYISYWAYWGQGTLVTVSSGGGGSGGGGSGGGGSQTVVTQEPSLTVSPGGTVTLTCASSTGAVTSGNYPNWVQQKPGQAPRGLIGGTKFLVPGTPARFSGSLLGGKAALTLSGVQPEDEAEYYCTLWYSNRWVFGGGTKLTVLHHHHHH

SEQ ID NO: 3226 - protein, 507 aa, synthetic construct
  REGION 1..507: note = Description of Artificial Sequence: Synthetic polypeptide
EVQLVESGGGLVQPGRSLTLSCAASTNIFSTSPMGWYRQAPGKQRELVAAIHGFQTLYADSVKGRFTISRDNAKNSIYLQMNSLRPEDTALYYCNKVPWGDYHPRNVVWGQGTQVTVSSGGGGSGGGSEVQLVESGGGLVQPGNSLRLSCAASGFTFSKFGMSWVRQAPGKGLEWVSSISGSGRDTLYADSVKGRFTISRDNAKTTLYLQMNSLRPEDTAVYYCTIGGSLSVSSQGTLVTVSSGGGGSGGGSEVQLVESGGGLVQPGGSLKLSCAASGFTFNKYAINWVRQAPGKGLEWVARIRSKYNNYATYYADQVKDRFTISRDDSKNTAYLQMNNLKTEDTAVYYCVRHANFGNSYISYWAYWGQGTLVTVSSGGGGSGGGGSGGGGSQTVVTQEPSLTVSPGGTVTLTCASSTGAVTSGNYPNWVQQKPGQAPRGLIGGTKFLVPGTPARFSGSLLGGKAALTLSGVQPEDEAEYYCTLWYSNRWVFGGGTKLTVLHHHHHH

SEQ ID NO: 3227 - protein, 507 aa, synthetic construct
  REGION 1..507: note = Description of Artificial Sequence: Synthetic polypeptide
EVQLVESGGGLVQPGRSLTLSCAASTNIFSRSPMGWYRQAPGKQRELVAAIHGFETLYADSVKGRFTISRDNAKNSIYLQMNSLRPEDTALYYCNKVPWGDYHPRNVLWGQGTQVTVSSGGGGSGGGSEVQLVESGGGLVQPGNSLRLSCAASGFTFSKFGMSWVRQAPGKGLEWVSSISGSGRDTLYADSVKGRFTISRDNAKTTLYLQMNSLRPEDTAVYYCTIGGSLSVSSQGTLVTVSSGGGGSGGGSEVQLVESGGGLVQPGGSLKLSCAASGFTFNKYAINWVRQAPGKGLEWVARIRSKYNNYATYYADQVKDRFTISRDDSKNTAYLQMNNLKTEDTAVYYCVRHANFGNSYISYWAYWGQGTLVTVSSGGGGSGGGGSGGGGSQTVVTQEPSLTVSPGGTVTLTCASSTGAVTSGNYPNWVQQKPGQAPRGLIGGTKFLVPGTPARFSGSLLGGKAALTLSGVQPEDEAEYYCTLWYSNRWVFGGGTKLTVLHHHHHH

SEQ ID NO: 3228 - protein, 507 aa, synthetic construct
  REGION 1..507: note = Description of Artificial Sequence: Synthetic polypeptide
EVQLVESGGGLVQPGRSLTLSCAASTNIFSESPMGWYRQAPGKQRELVAAIHGFTTLYADSVKGRFTISRDNAKNSIYLQMNSLRPEDTALYYCNKVPWGDYHPRNVTWGQGTQVTVSSGGGGSGGGSEVQLVESGGGLVQPGNSLRLSCAASGFTFSKFGMSWVRQAPGKGLEWVSSISGSGRDTLYADSVKGRFTISRDNAKTTLYLQMNSLRPEDTAVYYCTIGGSLSVSSQGTLVTVSSGGGGSGGGSEVQLVESGGGLVQPGGSLKLSCAASGFTFNKYAINWVRQAPGKGLEWVARIRSKYNNYATYYADQVKDRFTISRDDSKNTAYLQMNNLKTEDTAVYYCVRHANFGNSYISYWAYWGQGTLVTVSSGGGGSGGGGSGGGGSQTVVTQEPSLTVSPGGTVTLTCASSTGAVTSGNYPNWVQQKPGQAPRGLIGGTKFLVPGTPARFSGSLLGGKAALTLSGVQPEDEAEYYCTLWYSNRWVFGGGTKLTVLHHHHHH

SEQ ID NO: 3229 - protein, 507 aa, synthetic construct
  REGION 1..507: note = Description of Artificial Sequence: Synthetic polypeptide
EVQLVESGGGLVQPGRSLTLSCAASTNIFSDSPMGWYRQAPGKQRELVAAIHGFSTLYADSVKGRFTISRDNAKNSIYLQMNSLRPEDTALYYCNKVPWGDYHPRNVAWGQGTQVTVSSGGGGSGGGSEVQLVESGGGLVQPGNSLRLSCAASGFTFSKFGMSWVRQAPGKGLEWVSSISGSGRDTLYADSVKGRFTISRDNAKTTLYLQMNSLRPEDTAVYYCTIGGSLSVSSQGTLVTVSSGGGGSGGGSEVQLVESGGGLVQPGGSLKLSCAASGFTFNKYAINWVRQAPGKGLEWVARIRSKYNNYATYYADQVKDRFTISRDDSKNTAYLQMNNLKTEDTAVYYCVRHANFGNSYISYWAYWGQGTLVTVSSGGGGSGGGGSGGGGSQTVVTQEPSLTVSPGGTVTLTCASSTGAVTSGNYPNWVQQKPGQAPRGLIGGTKFLVPGTPARFSGSLLGGKAALTLSGVQPEDEAEYYCTLWYSNRWVFGGGTKLTVLHHHHHH

SEQ ID NO: 3230 - protein, 507 aa, synthetic construct
  REGION 1..507: note = Description of Artificial Sequence: Synthetic polypeptide
EVQLVESGGGLVQPGRSLTLSCAASTNIFSNSPMGWYRQAPGKQRELVAAIHGGSTLYADSVKGRFTISRDNAKNSIYLQMNSLRPEDTALYYCNKVPWGDYHPRNVHWGQGTQVTVSSGGGGSGGGSEVQLVESGGGLVQPGNSLRLSCAASGFTFSKFGMSWVRQAPGKGLEWVSSISGSGRDTLYADSVKGRFTISRDNAKTTLYLQMNSLRPEDTAVYYCTIGGSLSVSSQGTLVTVSSGGGGSGGGSEVQLVESGGGLVQPGGSLKLSCAASGFTFNKYAINWVRQAPGKGLEWVARIRSKYNNYATYYADQVKDRFTISRDDSKNTAYLQMNNLKTEDTAVYYCVRHANFGNSYISYWAYWGQGTLVTVSSGGGGSGGGGSGGGGSQTVVTQEPSLTVSPGGTVTLTCASSTGAVTSGNYPNWVQQKPGQAPRGLIGGTKFLVPGTPARFSGSLLGGKAALTLSGVQPEDEAEYYCTLWYSNRWVFGGGTKLTVLHHHHHH

SEQ ID NO: 3231 - protein, 507 aa, synthetic construct
  REGION 1..507: note = Description of Artificial Sequence: Synthetic polypeptide
EVQLVESGGGLVQPGRSLTLSCAASTNIFSNSPMGWYRQAPGKQRELVAAIHGRSTLYADSVKGRFTISRDNAKNSIYLQMNSLRPEDTALYYCNKVPWGDYHPRNVMWGQGTQVTVSSGGGGSGGGSEVQLVESGGGLVQPGNSLRLSCAASGFTFSKFGMSWVRQAPGKGLEWVSSISGSGRDTLYADSVKGRFTISRDNAKTTLYLQMNSLRPEDTAVYYCTIGGSLSVSSQGTLVTVSSGGGGSGGGSEVQLVESGGGLVQPGGSLKLSCAASGFTFNKYAINWVRQAPGKGLEWVARIRSKYNNYATYYADQVKDRFTISRDDSKNTAYLQMNNLKTEDTAVYYCVRHANFGNSYISYWAYWGQGTLVTVSSGGGGSGGGGSGGGGSQTVVTQEPSLTVSPGGTVTLTCASSTGAVTSGNYPNWVQQKPGQAPRGLIGGTKFLVPGTPARFSGSLLGGKAALTLSGVQPEDEAEYYCTLWYSNRWVFGGGTKLTVLHHHHHH

SEQ ID NO: 3232 - protein, 507 aa, synthetic construct
  REGION 1..507: note = Description of Artificial Sequence: Synthetic polypeptide
EVQLVESGGGLVQPGRSLTLSCAASTNIFSNSPMGWYRQAPGKQRELVAAIHGPSTLYADSVKGRFTISRDNAKNSIYLQMNSLRPEDTALYYCNKVPWGDYHPRNVTWGQGTQVTVSSGGGGSGGGSEVQLVESGGGLVQPGNSLRLSCAASGFTFSKFGMSWVRQAPGKGLEWVSSISGSGRDTLYADSVKGRFTISRDNAKTTLYLQMNSLRPEDTAVYYCTIGGSLSVSSQGTLVTVSSGGGGSGGGSEVQLVESGGGLVQPGGSLKLSCAASGFTFNKYAINWVRQAPGKGLEWVARIRSKYNNYATYYADQVKDRFTISRDDSKNTAYLQMNNLKTEDTAVYYCVRHANFGNSYISYWAYWGQGTLVTVSSGGGGSGGGGSGGGGSQTVVTQEPSLTVSPGGTVTLTCASSTGAVTSGNYPNWVQQKPGQAPRGLIGGTKFLVPGTPARFSGSLLGGKAALTLSGVQPEDEAEYYCTLWYSNRWVFGGGTKLTVLHHHHHH

SEQ ID NO: 3233 - protein, 507 aa, synthetic construct
  REGION 1..507: note = Description of Artificial Sequence: Synthetic polypeptide
EVQLVESGGGLVQPGRSLTLSCAASTNIFSNSPMGWYRQAPGKQRELVAAIHGDSTLYADSVKGRFTISRDNAKNSIYLQMNSLRPEDTALYYCNKVPWGDYHPRNVRWGQGTQVTVSSGGGGSGGGSEVQLVESGGGLVQPGNSLRLSCAASGFTFSKFGMSWVRQAPGKGLEWVSSISGSGRDTLYADSVKGRFTISRDNAKTTLYLQMNSLRPEDTAVYYCTIGGSLSVSSQGTLVTVSSGGGGSGGGSEVQLVESGGGLVQPGGSLKLSCAASGFTFNKYAINWVRQAPGKGLEWVARIRSKYNNYATYYADQVKDRFTISRDDSKNTAYLQMNNLKTEDTAVYYCVRHANFGNSYISYWAYWGQGTLVTVSSGGGGSGGGGSGGGGSQTVVTQEPSLTVSPGGTVTLTCASSTGAVTSGNYPNWVQQKPGQAPRGLIGGTKFLVPGTPARFSGSLLGGKAALTLSGVQPEDEAEYYCTLWYSNRWVFGGGTKLTVLHHHHHH

SEQ ID NO: 3234 - protein, 507 aa, synthetic construct
  REGION 1..507: note = Description of Artificial Sequence: Synthetic polypeptide
EVQLVESGGGLVQPGRSLTLSCAASTNIFSRSPMGWYRQAPGKQRELVAAIHGDSTLYADSVKGRFTISRDNAKNSIYLQMNSLRPEDTALYYCNKVPWGDYHPRNVTWGQGTQVTVSSGGGGSGGGSEVQLVESGGGLVQPGNSLRLSCAASGFTFSKFGMSWVRQAPGKGLEWVSSISGSGRDTLYADSVKGRFTISRDNAKTTLYLQMNSLRPEDTAVYYCTIGGSLSVSSQGTLVTVSSGGGGSGGGSEVQLVESGGGLVQPGGSLKLSCAASGFTFNKYAINWVRQAPGKGLEWVARIRSKYNNYATYYADQVKDRFTISRDDSKNTAYLQMNNLKTEDTAVYYCVRHANFGNSYISYWAYWGQGTLVTVSSGGGGSGGGGSGGGGSQTVVTQEPSLTVSPGGTVTLTCASSTGAVTSGNYPNWVQQKPGQAPRGLIGGTKFLVPGTPARFSGSLLGGKAALTLSGVQPEDEAEYYCTLWYSNRWVFGGGTKLTVLHHHHHH

SEQ ID NO: 3235 - protein, 507 aa, synthetic construct
  REGION 1..507: note = Description of Artificial Sequence: Synthetic polypeptide
EVQLVESGGGLVQPGRSLTLSCAASTNIFSKSPMGWYRQAPGKQRELVAAIHGQSTLYADSVKGRFTISRDNAKNSIYLQMNSLRPEDTALYYCNKVPWGDYHPRNVTWGQGTQVTVSSGGGGSGGGSEVQLVESGGGLVQPGNSLRLSCAASGFTFSKFGMSWVRQAPGKGLEWVSSISGSGRDTLYADSVKGRFTISRDNAKTTLYLQMNSLRPEDTAVYYCTIGGSLSVSSQGTLVTVSSGGGGSGGGSEVQLVESGGGLVQPGGSLKLSCAASGFTFNKYAINWVRQAPGKGLEWVARIRSKYNNYATYYADQVKDRFTISRDDSKNTAYLQMNNLKTEDTAVYYCVRHANFGNSYISYWAYWGQGTLVTVSSGGGGSGGGGSGGGGSQTVVTQEPSLTVSPGGTVTLTCASSTGAVTSGNYPNWVQQKPGQAPRGLIGGTKFLVPGTPARFSGSLLGGKAALTLSGVQPEDEAEYYCTLWYSNRWVFGGGTKLTVLHHHHHH

SEQ ID NO: 3236 - protein, 507 aa, synthetic construct
  REGION 1..507: note = Description of Artificial Sequence: Synthetic polypeptide
EVQLVESGGGLVQPGRSLTLSCAASTNIFSSSPMGWYRQAPGKQRELVAAIHGHSTLYADSVKGRFTISRDNAKNSIYLQMNSLRPEDTALYYCNKVPWGDYHPRNVTWGQGTQVTVSSGGGGSGGGSEVQLVESGGGLVQPGNSLRLSCAASGFTFSKFGMSWVRQAPGKGLEWVSSISGSGRDTLYADSVKGRFTISRDNAKTTLYLQMNSLRPEDTAVYYCTIGGSLSVSSQGTLVTVSSGGGGSGGGSEVQLVESGGGLVQPGGSLKLSCAASGFTFNKYAINWVRQAPGKGLEWVARIRSKYNNYATYYADQVKDRFTISRDDSKNTAYLQMNNLKTEDTAVYYCVRHANFGNSYISYWAYWGQGTLVTVSSGGGGSGGGGSGGGGSQTVVTQEPSLTVSPGGTVTLTCASSTGAVTSGNYPNWVQQKPGQAPRGLIGGTKFLVPGTPARFSGSLLGGKAALTLSGVQPEDEAEYYCTLWYSNRWVFGGGTKLTVLHHHHHH

SEQ ID NO: 3237 - protein, 507 aa, synthetic construct
  REGION 1..507: note = Description of Artificial Sequence: Synthetic polypeptide
EVQLVESGGGLVQPGRSLTLSCAASTNIFSSSPMGWYRQAPGKQRELVAAIHGESTLYADSVKGRFTISRDNAKNSIYLQMNSLRPEDTALYYCNKVPWGDYHPRKVYWGQGTQVTVSSGGGGSGGGSEVQLVESGGGLVQPGNSLRLSCAASGFTFSKFGMSWVRQAPGKGLEWVSSISGSGRDTLYADSVKGRFTISRDNAKTTLYLQMNSLRPEDTAVYYCTIGGSLSVSSQGTLVTVSSGGGGSGGGSEVQLVESGGGLVQPGGSLKLSCAASGFTFNKYAINWVRQAPGKGLEWVARIRSKYNNYATYYADQVKDRFTISRDDSKNTAYLQMNNLKTEDTAVYYCVRHANFGNSYISYWAYWGQGTLVTVSSGGGGSGGGGSGGGGSQTVVTQEPSLTVSPGGTVTLTCASSTGAVTSGNYPNWVQQKPGQAPRGLIGGTKFLVPGTPARFSGSLLGGKAALTLSGVQPEDEAEYYCTLWYSNRWVFGGGTKLTVLHHHHHH

SEQ ID NO: 3238 - protein, 507 aa, synthetic construct
  REGION 1..507: note = Description of Artificial Sequence: Synthetic polypeptide
EVQLVESGGGLVQPGRSLTLSCAASTNIFSRSPMGWYRQAPGKQRELVAAIHGNSTLYADSVKGRFTISRDNAKNSIYLQMNSLRPEDTALYYCNKVPWGIYHPRNVYWGQGTQVTVSSGGGGSGGGSEVQLVESGGGLVQPGNSLRLSCAASGFTFSKFGMSWVRQAPGKGLEWVSSISGSGRDTLYADSVKGRFTISRDNAKTTLYLQMNSLRPEDTAVYYCTIGGSLSVSSQGTLVTVSSGGGGSGGGSEVQLVESGGGLVQPGGSLKLSCAASGFTFNKYAINWVRQAPGKGLEWVARIRSKYNNYATYYADQVKDRFTISRDDSKNTAYLQMNNLKTEDTAVYYCVRHANFGNSYISYWAYWGQGTLVTVSSGGGGSGGGGSGGGGSQTVVTQEPSLTVSPGGTVTLTCASSTGAVTSGNYPNWVQQKPGQAPRGLIGGTKFLVPGTPARFSGSLLGGKAALTLSGVQPEDEAEYYCTLWYSNRWVFGGGTKLTVLHHHHHH

SEQ ID NO: 3239 - protein, 507 aa, synthetic construct
  REGION 1..507: note = Description of Artificial Sequence: Synthetic polypeptide
EVQLVESGGGLVQPGRSLTLSCAASTNIFSESPMGWYRQAPGKQRELVAAIHGNSTLYADSVKGRFTISRDNAKNSIYLQMNSLRPEDTALYYCNKVPWGTYHPRNVYWGQGTQVTVSSGGGGSGGGSEVQLVESGGGLVQPGNSLRLSCAASGFTFSKFGMSWVRQAPGKGLEWVSSISGSGRDTLYADSVKGRFTISRDNAKTTLYLQMNSLRPEDTAVYYCTIGGSLSVSSQGTLVTVSSGGGGSGGGSEVQLVESGGGLVQPGGSLKLSCAASGFTFNKYAINWVRQAPGKGLEWVARIRSKYNNYATYYADQVKDRFTISRDDSKNTAYLQMNNLKTEDTAVYYCVRHANFGNSYISYWAYWGQGTLVTVSSGGGGSGGGGSGGGGSQTVVTQEPSLTVSPGGTVTLTCASSTGAVTSGNYPNWVQQKPGQAPRGLIGGTKFLVPGTPARFSGSLLGGKAALTLSGVQPEDEAEYYCTLWYSNRWVFGGGTKLTVLHHHHHH

SEQ ID NO: 3240 - protein, 507 aa, synthetic construct
  REGION 1..507: note = Description of Artificial Sequence: Synthetic polypeptide
EVQLVESGGGLVQPGRSLTLSCAASTNIFSVSPMGWYRQAPGKQRELVAAIHGNSTLYADSVKGRFTISRDNAKNSIYLQMNSLRPEDTALYYCNKVPWGKYHPRNVYWGQGTQVTVSSGGGGSGGGSEVQLVESGGGLVQPGNSLRLSCAASGFTFSKFGMSWVRQAPGKGLEWVSSISGSGRDTLYADSVKGRFTISRDNAKTTLYLQMNSLRPEDTAVYYCTIGGSLSVSSQGTLVTVSSGGGGSGGGSEVQLVESGGGLVQPGGSLKLSCAASGFTFNKYAINWVRQAPGKGLEWVARIRSKYNNYATYYADQVKDRFTISRDDSKNTAYLQMNNLKTEDTAVYYCVRHANFGNSYISYWAYWGQGTLVTVSSGGGGSGGGGSGGGGSQTVVTQEPSLTVSPGGTVTLTCASSTGAVTSGNYPNWVQQKPGQAPRGLIGGTKFLVPGTPARFSGSLLGGKAALTLSGVQPEDEAEYYCTLWYSNRWVFGGGTKLTVLHHHHHH

SEQ ID NO: 3241 - protein, 507 aa, synthetic construct
  REGION 1..507: note = Description of Artificial Sequence: Synthetic polypeptide
EVQLVESGGGLVQPGRSLTLSCAASTNIFSVSPMGWYRQAPGKQRELVAAIHGNSTLYADSVKGRFTISRDNAKNSIYLQMNSLRPEDTALYYCNKVPWGDYHPRNVYWGQGTQVTVSSGGGGSGGGSEVQLVESGGGLVQPGNSLRLSCAASGFTFSKFGMSWVRQAPGKGLEWVSSISGSGRDTLYADSVKGRFTISRDNAKTTLYLQMNSLRPEDTAVYYCTIGGSLSVSSQGTLVTVSSGGGGSGGGSEVQLVESGGGLVQPGGSLKLSCAASGFTFNKYAINWVRQAPGKGLEWVARIRSKYNNYATYYADQVKDRFTISRDDSKNTAYLQMNNLKTEDTAVYYCVRHANFGNSYISYWAYWGQGTLVTVSSGGGGSGGGGSGGGGSQTVVTQEPSLTVSPGGTVTLTCASSTGAVTSGNYPNWVQQKPGQAPRGLIGGTKFLVPGTPARFSGSLLGGKAALTLSGVQPEDEAEYYCTLWYSNRWVFGGGTKLTVLHHHHHH

SEQ ID NO: 3242 - protein, 507 aa, synthetic construct
  REGION 1..507: note = Description of Artificial Sequence: Synthetic polypeptide
EVQLVESGGGLVQPGRSLTLSCAASTNIFSKSPMGWYRQAPGKQRELVAAIHGNSTLYADSVKGRFTISRDNAKNSIYLQMNSLRPEDTALYYCNKVPWGDYHPREVYWGQGTQVTVSSGGGGSGGGSEVQLVESGGGLVQPGNSLRLSCAASGFTFSKFGMSWVRQAPGKGLEWVSSISGSGRDTLYADSVKGRFTISRDNAKTTLYLQMNSLRPEDTAVYYCTIGGSLSVSSQGTLVTVSSGGGGSGGGSEVQLVESGGGLVQPGGSLKLSCAASGFTFNKYAINWVRQAPGKGLEWVARIRSKYNNYATYYADQVKDRFTISRDDSKNTAYLQMNNLKTEDTAVYYCVRHANFGNSYISYWAYWGQGTLVTVSSGGGGSGGGGSGGGGSQTVVTQEPSLTVSPGGTVTLTCASSTGAVTSGNYPNWVQQKPGQAPRGLIGGTKFLVPGTPARFSGSLLGGKAALTLSGVQPEDEAEYYCTLWYSNRWVFGGGTKLTVLHHHHHH

SEQ ID NO: 3243 - protein, 507 aa, synthetic construct
  REGION 1..507: note = Description of Artificial Sequence: Synthetic polypeptide
EVQLVESGGGLVQPGRSLTLSCAASTNIFSDSPMGWYRQAPGKQRELVAAIHGTSTLYADSVKGRFTISRDNAKNSIYLQMNSLRPEDTALYYCNKVPWGDYHPRNVYWGQGTQVTVSSGGGGSGGGSEVQLVESGGGLVQPGNSLRLSCAASGFTFSKFGMSWVRQAPGKGLEWVSSISGSGRDTLYADSVKGRFTISRDNAKTTLYLQMNSLRPEDTAVYYCTIGGSLSVSSQGTLVTVSSGGGGSGGGSEVQLVESGGGLVQPGGSLKLSCAASGFTFNKYAINWVRQAPGKGLEWVARIRSKYNNYATYYADQVKDRFTISRDDSKNTAYLQMNNLKTEDTAVYYCVRHANFGNSYISYWAYWGQGTLVTVSSGGGGSGGGGSGGGGSQTVVTQEPSLTVSPGGTVTLTCASSTGAVTSGNYPNWVQQKPGQAPRGLIGGTKFLVPGTPARFSGSLLGGKAALTLSGVQPEDEAEYYCTLWYSNRWVFGGGTKLTVLHHHHHH

SEQ ID NO: 3244 - protein, 507 aa, synthetic construct
  REGION 1..507: note = Description of Artificial Sequence: Synthetic polypeptide
EVQLVESGGGLVQPGRSLTLSCAASTNIFSRSPMGWYRQAPGKQRELVAAIHGTSTLYADSVKGRFTISRDNAKNSIYLQMNSLRPEDTALYYCNKVPWGKYHPRNVYWGQGTQVTVSSGGGGSGGGSEVQLVESGGGLVQPGNSLRLSCAASGFTFSKFGMSWVRQAPGKGLEWVSSISGSGRDTLYADSVKGRFTISRDNAKTTLYLQMNSLRPEDTAVYYCTIGGSLSVSSQGTLVTVSSGGGGSGGGSEVQLVESGGGLVQPGGSLKLSCAASGFTFNKYAINWVRQAPGKGLEWVARIRSKYNNYATYYADQVKDRFTISRDDSKNTAYLQMNNLKTEDTAVYYCVRHANFGNSYISYWAYWGQGTLVTVSSGGGGSGGGGSGGGGSQTVVTQEPSLTVSPGGTVTLTCASSTGAVTSGNYPNWVQQKPGQAPRGLIGGTKFLVPGTPARFSGSLLGGKAALTLSGVQPEDEAEYYCTLWYSNRWVFGGGTKLTVLHHHHHH

SEQ ID NO: 3245 - protein, 507 aa, synthetic construct
  REGION 1..507: note = Description of Artificial Sequence: Synthetic polypeptide
EVQLVESGGGLVQPGRSLTLSCAASTNIFSHSPMGWYRQAPGKQRELVAAIHGTSTLYADSVKGRFTISRDNAKNSIYLQMNSLRPEDTALYYCNKVPWGRYHPRNVYWGQGTQVTVSSGGGGSGGGSEVQLVESGGGLVQPGNSLRLSCAASGFTFSKFGMSWVRQAPGKGLEWVSSISGSGRDTLYADSVKGRFTISRDNAKTTLYLQMNSLRPEDTAVYYCTIGGSLSVSSQGTLVTVSSGGGGSGGGSEVQLVESGGGLVQPGGSLKLSCAASGFTFNKYAINWVRQAPGKGLEWVARIRSKYNNYATYYADQVKDRFTISRDDSKNTAYLQMNNLKTEDTAVYYCVRHANFGNSYISYWAYWGQGTLVTVSSGGGGSGGGGSGGGGSQTVVTQEPSLTVSPGGTVTLTCASSTGAVTSGNYPNWVQQKPGQAPRGLIGGTKFLVPGTPARFSGSLLGGKAALTLSGVQPEDEAEYYCTLWYSNRWVFGGGTKLTVLHHHHHH

SEQ ID NO: 3246 - protein, 507 aa, synthetic construct
  REGION 1..507: note = Description of Artificial Sequence: Synthetic polypeptide
EVQLVESGGGLVQPGRSLTLSCAASTNIFSTSPMGWYRQAPGKQRELVAAIHGTSTLYADSVKGRFTISRDNAKNSIYLQMNSLRPEDTALYYCNKVPWGDYHPGNVYWGQGTQVTVSSGGGGSGGGSEVQLVESGGGLVQPGNSLRLSCAASGFTFSKFGMSWVRQAPGKGLEWVSSISGSGRDTLYADSVKGRFTISRDNAKTTLYLQMNSLRPEDTAVYYCTIGGSLSVSSQGTLVTVSSGGGGSGGGSEVQLVESGGGLVQPGGSLKLSCAASGFTFNKYAINWVRQAPGKGLEWVARIRSKYNNYATYYADQVKDRFTISRDDSKNTAYLQMNNLKTEDTAVYYCVRHANFGNSYISYWAYWGQGTLVTVSSGGGGSGGGGSGGGGSQTVVTQEPSLTVSPGGTVTLTCASSTGAVTSGNYPNWVQQKPGQAPRGLIGGTKFLVPGTPARFSGSLLGGKAALTLSGVQPEDEAEYYCTLWYSNRWVFGGGTKLTVLHHHHHH

SEQ ID NO: 3247 - protein, 507 aa, synthetic construct
  REGION 1..507: note = Description of Artificial Sequence: Synthetic polypeptide
EVQLVESGGGLVQPGRSLTLSCAASTNIFSTSPMGWYRQAPGKQRELVAAIHGTSTLYADSVKGRFTISRDNAKNSIYLQMNSLRPEDTALYYCNKVPWGDYHPRNVQWGQGTQVTVSSGGGGSGGGSEVQLVESGGGLVQPGNSLRLSCAASGFTFSKFGMSWVRQAPGKGLEWVSSISGSGRDTLYADSVKGRFTISRDNAKTTLYLQMNSLRPEDTAVYYCTIGGSLSVSSQGTLVTVSSGGGGSGGGSEVQLVESGGGLVQPGGSLKLSCAASGFTFNKYAINWVRQAPGKGLEWVARIRSKYNNYATYYADQVKDRFTISRDDSKNTAYLQMNNLKTEDTAVYYCVRHANFGNSYISYWAYWGQGTLVTVSSGGGGSGGGGSGGGGSQTVVTQEPSLTVSPGGTVTLTCASSTGAVTSGNYPNWVQQKPGQAPRGLIGGTKFLVPGTPARFSGSLLGGKAALTLSGVQPEDEAEYYCTLWYSNRWVFGGGTKLTVLHHHHHH

SEQ ID NO: 3248 - protein, 507 aa, synthetic construct
  REGION 1..507: note = Description of Artificial Sequence: Synthetic polypeptide
EVQLVESGGGLVQPGRSLTLSCAASTNIFSLSPMGWYRQAPGKQRELVAAIHGDSTLYADSVKGRFTISRDNAKNSIYLQMNSLRPEDTALYYCNKVPWGDYHPRNVYWGQGTQVTVSSGGGGSGGGSEVQLVESGGGLVQPGNSLRLSCAASGFTFSKFGMSWVRQAPGKGLEWVSSISGSGRDTLYADSVKGRFTISRDNAKTTLYLQMNSLRPEDTAVYYCTIGGSLSVSSQGTLVTVSSGGGGSGGGSEVQLVESGGGLVQPGGSLKLSCAASGFTFNKYAINWVRQAPGKGLEWVARIRSKYNNYATYYADQVKDRFTISRDDSKNTAYLQMNNLKTEDTAVYYCVRHANFGNSYISYWAYWGQGTLVTVSSGGGGSGGGGSGGGGSQTVVTQEPSLTVSPGGTVTLTCASSTGAVTSGNYPNWVQQKPGQAPRGLIGGTKFLVPGTPARFSGSLLGGKAALTLSGVQPEDEAEYYCTLWYSNRWVFGGGTKLTVLHHHHHH

SEQ ID NO: 3249 - protein, 507 aa, synthetic construct
  REGION 1..507: note = Description of Artificial Sequence: Synthetic polypeptide
EVQLVESGGGLVQPGRSLTLSCAASTNIFSISPGGWYRQAPGKQRELVAAIHGSSTLYADSVKGRFTISRDNAKNSIYLQMNSLRPEDTALYYCNKVPWGDYHPRNVYWGQGTQVTVSSGGGGSGGGSEVQLVESGGGLVQPGNSLRLSCAASGFTFSKFGMSWVRQAPGKGLEWVSSISGSGRDTLYADSVKGRFTISRDNAKTTLYLQMNSLRPEDTAVYYCTIGGSLSVSSQGTLVTVSSGGGGSGGGSEVQLVESGGGLVQPGGSLKLSCAASGFTFNKYAINWVRQAPGKGLEWVARIRSKYNNYATYYADQVKDRFTISRDDSKNTAYLQMNNLKTEDTAVYYCVRHANFGNSYISYWAYWGQGTLVTVSSGGGGSGGGGSGGGGSQTVVTQEPSLTVSPGGTVTLTCASSTGAVTSGNYPNWVQQKPGQAPRGLIGGTKFLVPGTPARFSGSLLGGKAALTLSGVQPEDEAEYYCTLWYSNRWVFGGGTKLTVLHHHHHH

SEQ ID NO: 3250 - protein, 507 aa, synthetic construct
  REGION 1..507: note = Description of Artificial Sequence: Synthetic polypeptide
EVQLVESGGGLVQPGRSLTLSCAASTNHFSISPMGWYRQAPGKQRELVAAIHGSSTLYADSVKGRFTISRDNAKNSIYLQMNSLRPEDTALYYCNKVPWGDYHPRVVYWGQGTQVTVSSGGGGSGGGSEVQLVESGGGLVQPGNSLRLSCAASGFTFSKFGMSWVRQAPGKGLEWVSSISGSGRDTLYADSVKGRFTISRDNAKTTLYLQMNSLRPEDTAVYYCTIGGSLSVSSQGTLVTVSSGGGGSGGGSEVQLVESGGGLVQPGGSLKLSCAASGFTFNKYAINWVRQAPGKGLEWVARIRSKYNNYATYYADQVKDRFTISRDDSKNTAYLQMNNLKTEDTAVYYCVRHANFGNSYISYWAYWGQGTLVTVSSGGGGSGGGGSGGGGSQTVVTQEPSLTVSPGGTVTLTCASSTGAVTSGNYPNWVQQKPGQAPRGLIGGTKFLVPGTPARFSGSLLGGKAALTLSGVQPEDEAEYYCTLWYSNRWVFGGGTKLTVLHHHHHH

SEQ ID NO: 3251 - protein, 507 aa, synthetic construct
  REGION 1..507: note = Description of Artificial Sequence: Synthetic polypeptide
EVQLVESGGGLVQPGRSLTLSCAASTNIFSASPMGWYRQAPGKQRELVAAIHGSSTLYADSVKGRFTISRDNAKNSIYLQMNSLRPEDTALYYCNKVPWGDYHPRNVNWGQGTQVTVSSGGGGSGGGSEVQLVESGGGLVQPGNSLRLSCAASGFTFSKFGMSWVRQAPGKGLEWVSSISGSGRDTLYADSVKGRFTISRDNAKTTLYLQMNSLRPEDTAVYYCTIGGSLSVSSQGTLVTVSSGGGGSGGGSEVQLVESGGGLVQPGGSLKLSCAASGFTFNKYAINWVRQAPGKGLEWVARIRSKYNNYATYYADQVKDRFTISRDDSKNTAYLQMNNLKTEDTAVYYCVRHANFGNSYISYWAYWGQGTLVTVSSGGGGSGGGGSGGGGSQTVVTQEPSLTVSPGGTVTLTCASSTGAVTSGNYPNWVQQKPGQAPRGLIGGTKFLVPGTPARFSGSLLGGKAALTLSGVQPEDEAEYYCTLWYSNRWVFGGGTKLTVLHHHHHH

SEQ ID NO: 3252 - protein, 507 aa, synthetic construct
  REGION 1..507: note = Description of Artificial Sequence: Synthetic polypeptide
EVQLVESGGGLVQPGRSLTLSCAASTNIFSASPMGWYRQAPGKQRELVAAIHGSSTLYADSVKGRFTISRDNAKNSIYLQMNSLRPEDTALYYCNKVPWGRYHPRNVYWGQGTQVTVSSGGGGSGGGSEVQLVESGGGLVQPGNSLRLSCAASGFTFSKFGMSWVRQAPGKGLEWVSSISGSGRDTLYADSVKGRFTISRDNAKTTLYLQMNSLRPEDTAVYYCTIGGSLSVSSQGTLVTVSSGGGGSGGGSEVQLVESGGGLVQPGGSLKLSCAASGFTFNKYAINWVRQAPGKGLEWVARIRSKYNNYATYYADQVKDRFTISRDDSKNTAYLQMNNLKTEDTAVYYCVRHANFGNSYISYWAYWGQGTLVTVSSGGGGSGGGGSGGGGSQTVVTQEPSLTVSPGGTVTLTCASSTGAVTSGNYPNWVQQKPGQAPRGLIGGTKFLVPGTPARFSGSLLGGKAALTLSGVQPEDEAEYYCTLWYSNRWVFGGGTKLTVLHHHHHH

SEQ ID NO: 3253 - protein, 507 aa, synthetic construct
  REGION 1..507: note = Description of Artificial Sequence: Synthetic polypeptide
EVQLVESGGGLVQPGRSLTLSCAASTNISSISPMGWYRQAPGKQRELVAAIHGTSTLYADSVKGRFTISRDNAKNSIYLQMNSLRPEDTALYYCNKVPWGDYHPGNVYWGQGTQVTVSSGGGGSGGGSEVQLVESGGGLVQPGNSLRLSCAASGFTFSKFGMSWVRQAPGKGLEWVSSISGSGRDTLYADSVKGRFTISRDNAKTTLYLQMNSLRPEDTAVYYCTIGGSLSVSSQGTLVTVSSGGGGSGGGSEVQLVESGGGLVQPGGSLKLSCAASGFTFNKYAINWVRQAPGKGLEWVARIRSKYNNYATYYADQVKDRFTISRDDSKNTAYLQMNNLKTEDTAVYYCVRHANFGNSYISYWAYWGQGTLVTVSSGGGGSGGGGSGGGGSQTVVTQEPSLTVSPGGTVTLTCASSTGAVTSGNYPNWVQQKPGQAPRGLIGGTKFLVPGTPARFSGSLLGGKAALTLSGVQPEDEAEYYCTLWYSNRWVFGGGTKLTVLHHHHHH

SEQ ID NO: 3254 - protein, 507 aa, synthetic construct
  REGION 1..507: note = Description of Artificial Sequence: Synthetic polypeptide
EVQLVESGGGLVQPGRSLTLSCAASTNIESISPMGWYRQAPGKQRELVAAIHGTSTLYADSVKGRFTISRDNAKNSIYLQMNSLRPEDTALYYCNKVPWGDYHPGNVYWGQGTQVTVSSGGGGSGGGSEVQLVESGGGLVQPGNSLRLSCAASGFTFSKFGMSWVRQAPGKGLEWVSSISGSGRDTLYADSVKGRFTISRDNAKTTLYLQMNSLRPEDTAVYYCTIGGSLSVSSQGTLVTVSSGGGGSGGGSEVQLVESGGGLVQPGGSLKLSCAASGFTFNKYAINWVRQAPGKGLEWVARIRSKYNNYATYYADQVKDRFTISRDDSKNTAYLQMNNLKTEDTAVYYCVRHANFGNSYISYWAYWGQGTLVTVSSGGGGSGGGGSGGGGSQTVVTQEPSLTVSPGGTVTLTCASSTGAVTSGNYPNWVQQKPGQAPRGLIGGTKFLVPGTPARFSGSLLGGKAALTLSGVQPEDEAEYYCTLWYSNRWVFGGGTKLTVLHHHHHH

SEQ ID NO: 3255 - protein, 507 aa, synthetic construct
  REGION 1..507: note = Description of Artificial Sequence: Synthetic polypeptide
EVQLVESGGGLVQPGRSLTLSCAASTNIFSISPYGWYRQAPGKQRELVAAIHGTSTLYADSVKGRFTISRDNAKNSIYLQMNSLRPEDTALYYCNKVPWGDYHPGNVYWGQGTQVTVSSGGGGSGGGSEVQLVESGGGLVQPGNSLRLSCAASGFTFSKFGMSWVRQAPGKGLEWVSSISGSGRDTLYADSVKGRFTISRDNAKTTLYLQMNSLRPEDTAVYYCTIGGSLSVSSQGTLVTVSSGGGGSGGGSEVQLVESGGGLVQPGGSLKLSCAASGFTFNKYAINWVRQAPGKGLEWVARIRSKYNNYATYYADQVKDRFTISRDDSKNTAYLQMNNLKTEDTAVYYCVRHANFGNSYISYWAYWGQGTLVTVSSGGGGSGGGGSGGGGSQTVVTQEPSLTVSPGGTVTLTCASSTGAVTSGNYPNWVQQKPGQAPRGLIGGTKFLVPGTPARFSGSLLGGKAALTLSGVQPEDEAEYYCTLWYSNRWVFGGGTKLTVLHHHHHH

SEQ ID NO: 3256 - protein, 507 aa, synthetic construct
  REGION 1..507: note = Description of Artificial Sequence: Synthetic polypeptide
EVQLVESGGGLVQPGRSLTLSCAASTNIASISPMGWYRQAPGKQRELVAAIHGTSTLYADSVKGRFTISRDNAKNSIYLQMNSLRPEDTALYYCNKVPWGDYHPGNVYWGQGTQVTVSSGGGGSGGGSEVQLVESGGGLVQPGNSLRLSCAASGFTFSKFGMSWVRQAPGKGLEWVSSISGSGRDTLYADSVKGRFTISRDNAKTTLYLQMNSLRPEDTAVYYCTIGGSLSVSSQGTLVTVSSGGGGSGGGSEVQLVESGGGLVQPGGSLKLSCAASGFTFNKYAINWVRQAPGKGLEWVARIRSKYNNYATYYADQVKDRFTISRDDSKNTAYLQMNNLKTEDTAVYYCVRHANFGNSYISYWAYWGQGTLVTVSSGGGGSGGGGSGGGGSQTVVTQEPSLTVSPGGTVTLTCASSTGAVTSGNYPNWVQQKPGQAPRGLIGGTKFLVPGTPARFSGSLLGGKAALTLSGVQPEDEAEYYCTLWYSNRWVFGGGTKLTVLHHHHHH

SEQ ID NO: 3257 - protein, 507 aa, synthetic construct
  REGION 1..507: note = Description of Artificial Sequence: Synthetic polypeptide
EVQLVESGGGLVQPGRSLTLSCAASTNIASISPMGWYRQAPGKQRELVAAIHGKSTLYADSVKGRFTISRDNAKNSIYLQMNSLRPEDTALYYCNKVPWGDYHPGNVYWGQGTQVTVSSGGGGSGGGSEVQLVESGGGLVQPGNSLRLSCAASGFTFSKFGMSWVRQAPGKGLEWVSSISGSGRDTLYADSVKGRFTISRDNAKTTLYLQMNSLRPEDTAVYYCTIGGSLSVSSQGTLVTVSSGGGGSGGGSEVQLVESGGGLVQPGGSLKLSCAASGFTFNKYAINWVRQAPGKGLEWVARIRSKYNNYATYYADQVKDRFTISRDDSKNTAYLQMNNLKTEDTAVYYCVRHANFGNSYISYWAYWGQGTLVTVSSGGGGSGGGGSGGGGSQTVVTQEPSLTVSPGGTVTLTCASSTGAVTSGNYPNWVQQKPGQAPRGLIGGTKFLVPGTPARFSGSLLGGKAALTLSGVQPEDEAEYYCTLWYSNRWVFGGGTKLTVLHHHHHH

SEQ ID NO: 3258 - protein, 507 aa, synthetic construct
  REGION 1..507: note = Description of Artificial Sequence: Synthetic polypeptide
EVQLVESGGGLVQPGRSLTLSCAASTNIASISPMGWYRQAPGKQRELVAAIHGSSTLYADSVKGRFTISRDNAKNSIYLQMNSLRPEDTALYYCNKVPWGDYHPGNVYWGQGTQVTVSSGGGGSGGGSEVQLVESGGGLVQPGNSLRLSCAASGFTFSKFGMSWVRQAPGKGLEWVSSISGSGRDTLYADSVKGRFTISRDNAKTTLYLQMNSLRPEDTAVYYCTIGGSLSVSSQGTLVTVSSGGGGSGGGSEVQLVESGGGLVQPGGSLKLSCAASGFTFNKYAINWVRQAPGKGLEWVARIRSKYNNYATYYADQVKDRFTISRDDSKNTAYLQMNNLKTEDTAVYYCVRHANFGNSYISYWAYWGQGTLVTVSSGGGGSGGGGSGGGGSQTVVTQEPSLTVSPGGTVTLTCASSTGAVTSGNYPNWVQQKPGQAPRGLIGGTKFLVPGTPARFSGSLLGGKAALTLSGVQPEDEAEYYCTLWYSNRWVFGGGTKLTVLHHHHHH

SEQ ID NO: 3259 - protein, 507 aa, synthetic construct
  REGION 1..507: note = Description of Artificial Sequence: Synthetic polypeptide
EVQLVESGGGLVQPGRSLTLSCAASTNITSISPMGWYRQAPGKQRELVAAIHGDSTLYADSVKGRFTISRDNAKNSIYLQMNSLRPEDTALYYCNKVPWGDYHPGNVYWGQGTQVTVSSGGGGSGGGSEVQLVESGGGLVQPGNSLRLSCAASGFTFSKFGMSWVRQAPGKGLEWVSSISGSGRDTLYADSVKGRFTISRDNAKTTLYLQMNSLRPEDTAVYYCTIGGSLSVSSQGTLVTVSSGGGGSGGGSEVQLVESGGGLVQPGGSLKLSCAASGFTFNKYAINWVRQAPGKGLEWVARIRSKYNNYATYYADQVKDRFTISRDDSKNTAYLQMNNLKTEDTAVYYCVRHANFGNSYISYWAYWGQGTLVTVSSGGGGSGGGGSGGGGSQTVVTQEPSLTVSPGGTVTLTCASSTGAVTSGNYPNWVQQKPGQAPRGLIGGTKFLVPGTPARFSGSLLGGKAALTLSGVQPEDEAEYYCTLWYSNRWVFGGGTKLTVLHHHHHH

SEQ ID NO: 3260 - protein, 507 aa, synthetic construct
  REGION 1..507: note = Description of Artificial Sequence: Synthetic polypeptide
EVQLVESGGGLVQPGRSLTLSCAASTNIMSISPMGWYRQAPGKQRELVAAIHGNSTLYADSVKGRFTISRDNAKNSIYLQMNSLRPEDTALYYCNKVPWGDYHPGNVYWGQGTQVTVSSGGGGSGGGSEVQLVESGGGLVQPGNSLRLSCAASGFTFSKFGMSWVRQAPGKGLEWVSSISGSGRDTLYADSVKGRFTISRDNAKTTLYLQMNSLRPEDTAVYYCTIGGSLSVSSQGTLVTVSSGGGGSGGGSEVQLVESGGGLVQPGGSLKLSCAASGFTFNKYAINWVRQAPGKGLEWVARIRSKYNNYATYYADQVKDRFTISRDDSKNTAYLQMNNLKTEDTAVYYCVRHANFGNSYISYWAYWGQGTLVTVSSGGGGSGGGGSGGGGSQTVVTQEPSLTVSPGGTVTLTCASSTGAVTSGNYPNWVQQKPGQAPRGLIGGTKFLVPGTPARFSGSLLGGKAALTLSGVQPEDEAEYYCTLWYSNRWVFGGGTKLTVLHHHHHH

SEQ ID NO: 3261 - protein, 507 aa, synthetic construct
  REGION 1..507: note = Description of Artificial Sequence: Synthetic polypeptide
EVQLVESGGGLVQPGRSLTLSCAASTNITSISPMGWYRQAPGKQRELVAAIHGNSTLYADSVKGRFTISRDNAKNSIYLQMNSLRPEDTALYYCNKVPWGDYHPGNVYWGQGTQVTVSSGGGGSGGGSEVQLVESGGGLVQPGNSLRLSCAASGFTFSKFGMSWVRQAPGKGLEWVSSISGSGRDTLYADSVKGRFTISRDNAKTTLYLQMNSLRPEDTAVYYCTIGGSLSVSSQGTLVTVSSGGGGSGGGSEVQLVESGGGLVQPGGSLKLSCAASGFTFNKYAINWVRQAPGKGLEWVARIRSKYNNYATYYADQVKDRFTISRDDSKNTAYLQMNNLKTEDTAVYYCVRHANFGNSYISYWAYWGQGTLVTVSSGGGGSGGGGSGGGGSQTVVTQEPSLTVSPGGTVTLTCASSTGAVTSGNYPNWVQQKPGQAPRGLIGGTKFLVPGTPARFSGSLLGGKAALTLSGVQPEDEAEYYCTLWYSNRWVFGGGTKLTVLHHHHHH

SEQ ID NO: 3262 - protein, 507 aa, synthetic construct
  REGION 1..507: note = Description of Artificial Sequence: Synthetic polypeptide
EVQLVESGGGLVQPGRSLTLSCAASTNIVSISPMGWYRQAPGKQRELVAAIHGHSTLYADSVKGRFTISRDNAKNSIYLQMNSLRPEDTALYYCNKVPWGDYHPGNVYWGQGTQVTVSSGGGGSGGGSEVQLVESGGGLVQPGNSLRLSCAASGFTFSKFGMSWVRQAPGKGLEWVSSISGSGRDTLYADSVKGRFTISRDNAKTTLYLQMNSLRPEDTAVYYCTIGGSLSVSSQGTLVTVSSGGGGSGGGSEVQLVESGGGLVQPGGSLKLSCAASGFTFNKYAINWVRQAPGKGLEWVARIRSKYNNYATYYADQVKDRFTISRDDSKNTAYLQMNNLKTEDTAVYYCVRHANFGNSYISYWAYWGQGTLVTVSSGGGGSGGGGSGGGGSQTVVTQEPSLTVSPGGTVTLTCASSTGAVTSGNYPNWVQQKPGQAPRGLIGGTKFLVPGTPARFSGSLLGGKAALTLSGVQPEDEAEYYCTLWYSNRWVFGGGTKLTVLHHHHHH

SEQ ID NO: 3263 - protein, 507 aa, synthetic construct
  REGION 1..507: note = Description of Artificial Sequence: Synthetic polypeptide
EVQLVESGGGLVQPGRSLTLSCAASTNIVSISPMGWYRQAPGKQRELVAAIHGKSTLYADSVKGRFTISRDNAKNSIYLQMNSLRPEDTALYYCNKVPWGDYHPGNVYWGQGTQVTVSSGGGGSGGGSEVQLVESGGGLVQPGNSLRLSCAASGFTFSKFGMSWVRQAPGKGLEWVSSISGSGRDTLYADSVKGRFTISRDNAKTTLYLQMNSLRPEDTAVYYCTIGGSLSVSSQGTLVTVSSGGGGSGGGSEVQLVESGGGLVQPGGSLKLSCAASGFTFNKYAINWVRQAPGKGLEWVARIRSKYNNYATYYADQVKDRFTISRDDSKNTAYLQMNNLKTEDTAVYYCVRHANFGNSYISYWAYWGQGTLVTVSSGGGGSGGGGSGGGGSQTVVTQEPSLTVSPGGTVTLTCASSTGAVTSGNYPNWVQQKPGQAPRGLIGGTKFLVPGTPARFSGSLLGGKAALTLSGVQPEDEAEYYCTLWYSNRWVFGGGTKLTVLHHHHHH

SEQ ID NO: 3264 - protein, 507 aa, synthetic construct
  REGION 1..507: note = Description of Artificial Sequence: Synthetic polypeptide
EVQLVESGGGLVQPGRSLTLSCAASTNVVSISPMGWYRQAPGKQRELVAAIHGKSTLYADSVKGRFTISRDNAKNSIYLQMNSLRPEDTALYYCNKVPWGDYHPNNVYWGQGTQVTVSSGGGGSGGGSEVQLVESGGGLVQPGNSLRLSCAASGFTFSKFGMSWVRQAPGKGLEWVSSISGSGRDTLYADSVKGRFTISRDNAKTTLYLQMNSLRPEDTAVYYCTIGGSLSVSSQGTLVTVSSGGGGSGGGSEVQLVESGGGLVQPGGSLKLSCAASGFTFNKYAINWVRQAPGKGLEWVARIRSKYNNYATYYADQVKDRFTISRDDSKNTAYLQMNNLKTEDTAVYYCVRHANFGNSYISYWAYWGQGTLVTVSSGGGGSGGGGSGGGGSQTVVTQEPSLTVSPGGTVTLTCASSTGAVTSGNYPNWVQQKPGQAPRGLIGGTKFLVPGTPARFSGSLLGGKAALTLSGVQPEDEAEYYCTLWYSNRWVFGGGTKLTVLHHHHHH

SEQ ID NO: 3265 - protein, 507 aa, synthetic construct
  REGION 1..507: note = Description of Artificial Sequence: Synthetic polypeptide
EVQLVESGGGLVQPGRSLTLSCAASTNIISISPMGWYRQAPGKQRELVAAIHGASTLYADSVKGRFTISRDNAKNSIYLQMNSLRPEDTALYYCNKVPWGDYHPGNVYWGQGTQVTVSSGGGGSGGGSEVQLVESGGGLVQPGNSLRLSCAASGFTFSKFGMSWVRQAPGKGLEWVSSISGSGRDTLYADSVKGRFTISRDNAKTTLYLQMNSLRPEDTAVYYCTIGGSLSVSSQGTLVTVSSGGGGSGGGSEVQLVESGGGLVQPGGSLKLSCAASGFTFNKYAINWVRQAPGKGLEWVARIRSKYNNYATYYADQVKDRFTISRDDSKNTAYLQMNNLKTEDTAVYYCVRHANFGNSYISYWAYWGQGTLVTVSSGGGGSGGGGSGGGGSQTVVTQEPSLTVSPGGTVTLTCASSTGAVTSGNYPNWVQQKPGQAPRGLIGGTKFLVPGTPARFSGSLLGGKAALTLSGVQPEDEAEYYCTLWYSNRWVFGGGTKLTVLHHHHHH

SEQ ID NO: 3266 - protein, 507 aa, synthetic construct
  REGION 1..507: note = Description of Artificial Sequence: Synthetic polypeptide
EVQLVESGGGLVQPGRSLTLSCAASTNIFSITPMGWYRQAPGKQRELVAAIHGASTLYADSVKGRFTISRDNAKNSIYLQMNSLRPEDTALYYCNKVPWGDYHPGNVYWGQGTQVTVSSGGGGSGGGSEVQLVESGGGLVQPGNSLRLSCAASGFTFSKFGMSWVRQAPGKGLEWVSSISGSGRDTLYADSVKGRFTISRDNAKTTLYLQMNSLRPEDTAVYYCTIGGSLSVSSQGTLVTVSSGGGGSGGGSEVQLVESGGGLVQPGGSLKLSCAASGFTFNKYAINWVRQAPGKGLEWVARIRSKYNNYATYYADQVKDRFTISRDDSKNTAYLQMNNLKTEDTAVYYCVRHANFGNSYISYWAYWGQGTLVTVSSGGGGSGGGGSGGGGSQTVVTQEPSLTVSPGGTVTLTCASSTGAVTSGNYPNWVQQKPGQAPRGLIGGTKFLVPGTPARFSGSLLGGKAALTLSGVQPEDEAEYYCTLWYSNRWVFGGGTKLTVLHHHHHH

SEQ ID NO: 3267 - protein, 507 aa, synthetic construct
  REGION 1..507: note = Description of Artificial Sequence: Synthetic polypeptide
EVQLVESGGGLVQPGRSLTLSCAASTNITSISPMGWYRQAPGKQRELVAAIHGFETLYADSVKGRFTISRDNAKNSIYLQMNSLRPEDTALYYCNKVPWGDYHPGNVYWGQGTQVTVSSGGGGSGGGSEVQLVESGGGLVQPGNSLRLSCAASGFTFSKFGMSWVRQAPGKGLEWVSSISGSGRDTLYADSVKGRFTISRDNAKTTLYLQMNSLRPEDTAVYYCTIGGSLSVSSQGTLVTVSSGGGGSGGGSEVQLVESGGGLVQPGGSLKLSCAASGFTFNKYAINWVRQAPGKGLEWVARIRSKYNNYATYYADQVKDRFTISRDDSKNTAYLQMNNLKTEDTAVYYCVRHANFGNSYISYWAYWGQGTLVTVSSGGGGSGGGGSGGGGSQTVVTQEPSLTVSPGGTVTLTCASSTGAVTSGNYPNWVQQKPGQAPRGLIGGTKFLVPGTPARFSGSLLGGKAALTLSGVQPEDEAEYYCTLWYSNRWVFGGGTKLTVLHHHHHH

SEQ ID NO: 3268 - protein, 507 aa, synthetic construct
  REGION 1..507: note = Description of Artificial Sequence: Synthetic polypeptide
EVQLVESGGGLVQPGRSLTLSCAASTNIQSISPMGWYRQAPGKQRELVAAIHGFETLYADSVKGRFTISRDNAKNSIYLQMNSLRPEDTALYYCNKVPWGDYHPGNVYWGQGTQVTVSSGGGGSGGGSEVQLVESGGGLVQPGNSLRLSCAASGFTFSKFGMSWVRQAPGKGLEWVSSISGSGRDTLYADSVKGRFTISRDNAKTTLYLQMNSLRPEDTAVYYCTIGGSLSVSSQGTLVTVSSGGGGSGGGSEVQLVESGGGLVQPGGSLKLSCAASGFTFNKYAINWVRQAPGKGLEWVARIRSKYNNYATYYADQVKDRFTISRDDSKNTAYLQMNNLKTEDTAVYYCVRHANFGNSYISYWAYWGQGTLVTVSSGGGGSGGGGSGGGGSQTVVTQEPSLTVSPGGTVTLTCASSTGAVTSGNYPNWVQQKPGQAPRGLIGGTKFLVPGTPARFSGSLLGGKAALTLSGVQPEDEAEYYCTLWYSNRWVFGGGTKLTVLHHHHHH

SEQ ID NO: 3269 - protein, 507 aa, synthetic construct
  REGION 1..507: note = Description of Artificial Sequence: Synthetic polypeptide
EVQLVESGGGLVQPGRSLTLSCAASTSDFSISPMGWYRQAPGKQRELVAAIHGFETLYADSVKGRFTISRDNAKNSIYLQMNSLRPEDTALYYCNKVPWGDYHPGNVYWGQGTQVTVSSGGGGSGGGSEVQLVESGGGLVQPGNSLRLSCAASGFTFSKFGMSWVRQAPGKGLEWVSSISGSGRDTLYADSVKGRFTISRDNAKTTLYLQMNSLRPEDTAVYYCTIGGSLSVSSQGTLVTVSSGGGGSGGGSEVQLVESGGGLVQPGGSLKLSCAASGFTFNKYAINWVRQAPGKGLEWVARIRSKYNNYATYYADQVKDRFTISRDDSKNTAYLQMNNLKTEDTAVYYCVRHANFGNSYISYWAYWGQGTLVTVSSGGGGSGGGGSGGGGSQTVVTQEPSLTVSPGGTVTLTCASSTGAVTSGNYPNWVQQKPGQAPRGLIGGTKFLVPGTPARFSGSLLGGKAALTLSGVQPEDEAEYYCTLWYSNRWVFGGGTKLTVLHHHHHH

SEQ ID NO: 3270 - protein, 507 aa, synthetic construct
  REGION 1..507: note = Description of Artificial Sequence: Synthetic polypeptide
EVQLVESGGGLVQPGRSLTLSCAASTNIDSISPMGWYRQAPGKQRELVAAIHGFQTLYADSVKGRFTISRDNAKNSIYLQMNSLRPEDTALYYCNKVPWGDYHPGNVYWGQGTQVTVSSGGGGSGGGSEVQLVESGGGLVQPGNSLRLSCAASGFTFSKFGMSWVRQAPGKGLEWVSSISGSGRDTLYADSVKGRFTISRDNAKTTLYLQMNSLRPEDTAVYYCTIGGSLSVSSQGTLVTVSSGGGGSGGGSEVQLVESGGGLVQPGGSLKLSCAASGFTFNKYAINWVRQAPGKGLEWVARIRSKYNNYATYYADQVKDRFTISRDDSKNTAYLQMNNLKTEDTAVYYCVRHANFGNSYISYWAYWGQGTLVTVSSGGGGSGGGGSGGGGSQTVVTQEPSLTVSPGGTVTLTCASSTGAVTSGNYPNWVQQKPGQAPRGLIGGTKFLVPGTPARFSGSLLGGKAALTLSGVQPEDEAEYYCTLWYSNRWVFGGGTKLTVLHHHHHH

SEQ ID NO: 3271 - protein, 507 aa, synthetic construct
  REGION 1..507: note = Description of Artificial Sequence: Synthetic polypeptide
EVQLVESGGGLVQPGRSLTLSCAASTNIMSISPMGWYRQAPGKQRELVAAIHGFSTVYADSVKGRFTISRDNAKNSIYLQMNSLRPEDTALYYCNKVPWGDYHPGNVYWGQGTQVTVSSGGGGSGGGSEVQLVESGGGLVQPGNSLRLSCAASGFTFSKFGMSWVRQAPGKGLEWVSSISGSGRDTLYADSVKGRFTISRDNAKTTLYLQMNSLRPEDTAVYYCTIGGSLSVSSQGTLVTVSSGGGGSGGGSEVQLVESGGGLVQPGGSLKLSCAASGFTFNKYAINWVRQAPGKGLEWVARIRSKYNNYATYYADQVKDRFTISRDDSKNTAYLQMNNLKTEDTAVYYCVRHANFGNSYISYWAYWGQGTLVTVSSGGGGSGGGGSGGGGSQTVVTQEPSLTVSPGGTVTLTCASSTGAVTSGNYPNWVQQKPGQAPRGLIGGTKFLVPGTPARFSGSLLGGKAALTLSGVQPEDEAEYYCTLWYSNRWVFGGGTKLTVLHHHHHH

SEQ ID NO: 3272 - protein, 507 aa, synthetic construct
  REGION 1..507: note = Description of Artificial Sequence: Synthetic polypeptide
EVQLVESGGGLVQPGRSLTLSCAASTNIESISPMGWYRQAPGKQRELVAAIHGFSTLYADSVKGRFTISRDNAKNSIYLQMNSLRPEDTALYYCNKVPWGDYHPGNVYWGQGTQVTVSSGGGGSGGGSEVQLVESGGGLVQPGNSLRLSCAASGFTFSKFGMSWVRQAPGKGLEWVSSISGSGRDTLYADSVKGRFTISRDNAKTTLYLQMNSLRPEDTAVYYCTIGGSLSVSSQGTLVTVSSGGGGSGGGSEVQLVESGGGLVQPGGSLKLSCAASGFTFNKYAINWVRQAPGKGLEWVARIRSKYNNYATYYADQVKDRFTISRDDSKNTAYLQMNNLKTEDTAVYYCVRHANFGNSYISYWAYWGQGTLVTVSSGGGGSGGGGSGGGGSQTVVTQEPSLTVSPGGTVTLTCASSTGAVTSGNYPNWVQQKPGQAPRGLIGGTKFLVPGTPARFSGSLLGGKAALTLSGVQPEDEAEYYCTLWYSNRWVFGGGTKLTVLHHHHHH

SEQ ID NO: 3273 - protein, 507 aa, synthetic construct
  REGION 1..507: note = Description of Artificial Sequence: Synthetic polypeptide
EVQLVESGGGLVQPGRSLTLSCAASTNIFSSSPMGWYRQAPGKQRELVAAIHGFKTLYADSVKGRFTISRDNAKNSIYLQMNSLRPEDTARYYCNKVPWGDYHPGNVYWGQGTQVTVSSGGGGSGGGSEVQLVESGGGLVQPGNSLRLSCAASGFTFSKFGMSWVRQAPGKGLEWVSSISGSGRDTLYADSVKGRFTISRDNAKTTLYLQMNSLRPEDTAVYYCTIGGSLSVSSQGTLVTVSSGGGGSGGGSEVQLVESGGGLVQPGGSLKLSCAASGFTFNKYAINWVRQAPGKGLEWVARIRSKYNNYATYYADQVKDRFTISRDDSKNTAYLQMNNLKTEDTAVYYCVRHANFGNSYISYWAYWGQGTLVTVSSGGGGSGGGGSGGGGSQTVVTQEPSLTVSPGGTVTLTCASSTGAVTSGNYPNWVQQKPGQAPRGLIGGTKFLVPGTPARFSGSLLGGKAALTLSGVQPEDEAEYYCTLWYSNRWVFGGGTKLTVLHHHHHH

SEQ ID NO: 3274 - protein, 507 aa, synthetic construct
  REGION 1..507: note = Description of Artificial Sequence: Synthetic polypeptide
EVQLVESGGGLVQPGRSLTLSCAASTNIFSSSPMGWYRQAPGKQRELVAAIHGFSTLYADSVKGRFTISRDNAKNSIYLQMNSLRPEDTALYYCNKVPWGDYHPGNVYWGQGTQVTVSSGGGGSGGGSEVQLVESGGGLVQPGNSLRLSCAASGFTFSKFGMSWVRQAPGKGLEWVSSISGSGRDTLYADSVKGRFTISRDNAKTTLYLQMNSLRPEDTAVYYCTIGGSLSVSSQGTLVTVSSGGGGSGGGSEVQLVESGGGLVQPGGSLKLSCAASGFTFNKYAINWVRQAPGKGLEWVARIRSKYNNYATYYADQVKDRFTISRDDSKNTAYLQMNNLKTEDTAVYYCVRHANFGNSYISYWAYWGQGTLVTVSSGGGGSGGGGSGGGGSQTVVTQEPSLTVSPGGTVTLTCASSTGAVTSGNYPNWVQQKPGQAPRGLIGGTKFLVPGTPARFSGSLLGGKAALTLSGVQPEDEAEYYCTLWYSNRWVFGGGTKLTVLHHHHHH

SEQ ID NO: 3275 - protein, 507 aa, synthetic construct
  REGION 1..507: note = Description of Artificial Sequence: Synthetic polypeptide
EVQLVESGGGLVQPGRSLTLSCAASTNIFSNSPMGWYRQAPGKQRELVAAIHGFSTLYADSVKGRFTISRDNAKNSIYLQMNSLRPEDTALYYCNKVPWGDYHPGNVYWGQGTQVTVSSGGGGSGGGSEVQLVESGGGLVQPGNSLRLSCAASGFTFSKFGMSWVRQAPGKGLEWVSSISGSGRDTLYADSVKGRFTISRDNAKTTLYLQMNSLRPEDTAVYYCTIGGSLSVSSQGTLVTVSSGGGGSGGGSEVQLVESGGGLVQPGGSLKLSCAASGFTFNKYAINWVRQAPGKGLEWVARIRSKYNNYATYYADQVKDRFTISRDDSKNTAYLQMNNLKTEDTAVYYCVRHANFGNSYISYWAYWGQGTLVTVSSGGGGSGGGGSGGGGSQTVVTQEPSLTVSPGGTVTLTCASSTGAVTSGNYPNWVQQKPGQAPRGLIGGTKFLVPGTPARFSGSLLGGKAALTLSGVQPEDEAEYYCTLWYSNRWVFGGGTKLTVLHHHHHH

SEQ ID NO: 3276 - protein, 507 aa, synthetic construct
  REGION 1..507: note = Description of Artificial Sequence: Synthetic polypeptide
EVQLVESGGGLVQPGRSLTLSCAASTNIFSTSPMGWYRQAPGKQRELVAAIHGFSTIYADSVKGRFTISRDNAKNSIYLQMNSLRPEDTALYYCNKVPWGDYHPGNVYWGQGTQVTVSSGGGGSGGGSEVQLVESGGGLVQPGNSLRLSCAASGFTFSKFGMSWVRQAPGKGLEWVSSISGSGRDTLYADSVKGRFTISRDNAKTTLYLQMNSLRPEDTAVYYCTIGGSLSVSSQGTLVTVSSGGGGSGGGSEVQLVESGGGLVQPGGSLKLSCAASGFTFNKYAINWVRQAPGKGLEWVARIRSKYNNYATYYADQVKDRFTISRDDSKNTAYLQMNNLKTEDTAVYYCVRHANFGNSYISYWAYWGQGTLVTVSSGGGGSGGGGSGGGGSQTVVTQEPSLTVSPGGTVTLTCASSTGAVTSGNYPNWVQQKPGQAPRGLIGGTKFLVPGTPARFSGSLLGGKAALTLSGVQPEDEAEYYCTLWYSNRWVFGGGTKLTVLHHHHHH

SEQ ID NO: 3277 - protein, 507 aa, synthetic construct
  REGION 1..507: note = Description of Artificial Sequence: Synthetic polypeptide
EVQLVESGGGLVQPGRSLTLSCAASTNIFSTSPMGWYRQAPGKQRELVAAIHGFSTIYADSVKGRFTISRDNAKNSIYLQMNSLRPEDTALYYCNKVPWGDYHPLNVYWGQGTQVTVSSGGGGSGGGSEVQLVESGGGLVQPGNSLRLSCAASGFTFSKFGMSWVRQAPGKGLEWVSSISGSGRDTLYADSVKGRFTISRDNAKTTLYLQMNSLRPEDTAVYYCTIGGSLSVSSQGTLVTVSSGGGGSGGGSEVQLVESGGGLVQPGGSLKLSCAASGFTFNKYAINWVRQAPGKGLEWVARIRSKYNNYATYYADQVKDRFTISRDDSKNTAYLQMNNLKTEDTAVYYCVRHANFGNSYISYWAYWGQGTLVTVSSGGGGSGGGGSGGGGSQTVVTQEPSLTVSPGGTVTLTCASSTGAVTSGNYPNWVQQKPGQAPRGLIGGTKFLVPGTPARFSGSLLGGKAALTLSGVQPEDEAEYYCTLWYSNRWVFGGGTKLTVLHHHHHH

SEQ ID NO: 3278 - protein, 507 aa, synthetic construct
  REGION 1..507: note = Description of Artificial Sequence: Synthetic polypeptide
EVQLVESGGGLVQPGRSLTLSCVASTNIFSTSPMGWYRQAPGKQRELVAAIHGFSTLYADSVKGRFTISRDNAKNSIYLQMNSLRPEDTALYYCNKVPWGDYHPGNVYWGQGTQVTVSSGGGGSGGGSEVQLVESGGGLVQPGNSLRLSCAASGFTFSKFGMSWVRQAPGKGLEWVSSISGSGRDTLYADSVKGRFTISRDNAKTTLYLQMNSLRPEDTAVYYCTIGGSLSVSSQGTLVTVSSGGGGSGGGSEVQLVESGGGLVQPGGSLKLSCAASGFTFNKYAINWVRQAPGKGLEWVARIRSKYNNYATYYADQVKDRFTISRDDSKNTAYLQMNNLKTEDTAVYYCVRHANFGNSYISYWAYWGQGTLVTVSSGGGGSGGGGSGGGGSQTVVTQEPSLTVSPGGTVTLTCASSTGAVTSGNYPNWVQQKPGQAPRGLIGGTKFLVPGTPARFSGSLLGGKAALTLSGVQPEDEAEYYCTLWYSNRWVFGGGTKLTVLHHHHHH

SEQ ID NO: 3279 - protein, 507 aa, synthetic construct
  REGION 1..507: note = Description of Artificial Sequence: Synthetic polypeptide
EVQLVESGGGLVQPGRSLTLSCAASTNIFSDSPMGWYRQAPGKQRELVAAIHGFSTFYADSVKGRFTISRDNAKNSIYLQMNSLRPEDTALYYCNKVPWGDYHPGNVYWGQGTQVTVSSGGGGSGGGSEVQLVESGGGLVQPGNSLRLSCAASGFTFSKFGMSWVRQAPGKGLEWVSSISGSGRDTLYADSVKGRFTISRDNAKTTLYLQMNSLRPEDTAVYYCTIGGSLSVSSQGTLVTVSSGGGGSGGGSEVQLVESGGGLVQPGGSLKLSCAASGFTFNKYAINWVRQAPGKGLEWVARIRSKYNNYATYYADQVKDRFTISRDDSKNTAYLQMNNLKTEDTAVYYCVRHANFGNSYISYWAYWGQGTLVTVSSGGGGSGGGGSGGGGSQTVVTQEPSLTVSPGGTVTLTCASSTGAVTSGNYPNWVQQKPGQAPRGLIGGTKFLVPGTPARFSGSLLGGKAALTLSGVQPEDEAEYYCTLWYSNRWVFGGGTKLTVLHHHHHH

SEQ ID NO: 3280 - protein, 507 aa, synthetic construct
  REGION 1..507: note = Description of Artificial Sequence: Synthetic polypeptide
EVQLVESGGGLVQPGRSLTLSCAASTNIFSQSPMGWYRQAPGKQRELVAAIHGDSTLYADSVKGRFTISRDNAKNSIYLQMNSLRPEDTALYYCNKVPWGDYHPGNVCWGQGTQVTVSSGGGGSGGGSEVQLVESGGGLVQPGNSLRLSCAASGFTFSKFGMSWVRQAPGKGLEWVSSISGSGRDTLYADSVKGRFTISRDNAKTTLYLQMNSLRPEDTAVYYCTIGGSLSVSSQGTLVTVSSGGGGSGGGSEVQLVESGGGLVQPGGSLKLSCAASGFTFNKYAINWVRQAPGKGLEWVARIRSKYNNYATYYADQVKDRFTISRDDSKNTAYLQMNNLKTEDTAVYYCVRHANFGNSYISYWAYWGQGTLVTVSSGGGGSGGGGSGGGGSQTVVTQEPSLTVSPGGTVTLTCASSTGAVTSGNYPNWVQQKPGQAPRGLIGGTKFLVPGTPARFSGSLLGGKAALTLSGVQPEDEAEYYCTLWYSNRWVFGGGTKLTVLHHHHHH

SEQ ID NO: 3281 - protein, 507 aa, synthetic construct
  REGION 1..507: note = Description of Artificial Sequence: Synthetic polypeptide
EVQLVESGGGLVQPGRSLTLSCAASTNIFSQSPMGWYRQAPGKQRELVAAIHGKSTLYADSVKGRFTISRDNAKNSIYLQMNSLRPEDTALYYCNKVPWGDYHPSNVYWGKGTQVTVSSGGGGSGGGSEVQLVESGGGLVQPGNSLRLSCAASGFTFSKFGMSWVRQAPGKGLEWVSSISGSGRDTLYADSVKGRFTISRDNAKTTLYLQMNSLRPEDTAVYYCTIGGSLSVSSQGTLVTVSSGGGGSGGGSEVQLVESGGGLVQPGGSLKLSCAASGFTFNKYAINWVRQAPGKGLEWVARIRSKYNNYATYYADQVKDRFTISRDDSKNTAYLQMNNLKTEDTAVYYCVRHANFGNSYISYWAYWGQGTLVTVSSGGGGSGGGGSGGGGSQTVVTQEPSLTVSPGGTVTLTCASSTGAVTSGNYPNWVQQKPGQAPRGLIGGTKFLVPGTPARFSGSLLGGKAALTLSGVQPEDEAEYYCTLWYSNRWVFGGGTKLTVLHHHHHH

SEQ ID NO: 3282 - protein, 507 aa, synthetic construct
  REGION 1..507: note = Description of Artificial Sequence: Synthetic polypeptide
EVQLVESGGGLVQPGRSLTLSCAASTNIFSRSPMGWYRQAPGKQRELVAAIHGESTLYADSVKGRFTISRDNAKNSIYLQMNSLRPEDTALYYCNKVPWGRYHPGNVYWGQGTQVTVSSGGGGSGGGSEVQLVESGGGLVQPGNSLRLSCAASGFTFSKFGMSWVRQAPGKGLEWVSSISGSGRDTLYADSVKGRFTISRDNAKTTLYLQMNSLRPEDTAVYYCTIGGSLSVSSQGTLVTVSSGGGGSGGGSEVQLVESGGGLVQPGGSLKLSCAASGFTFNKYAINWVRQAPGKGLEWVARIRSKYNNYATYYADQVKDRFTISRDDSKNTAYLQMNNLKTEDTAVYYCVRHANFGNSYISYWAYWGQGTLVTVSSGGGGSGGGGSGGGGSQTVVTQEPSLTVSPGGTVTLTCASSTGAVTSGNYPNWVQQKPGQAPRGLIGGTKFLVPGTPARFSGSLLGGKAALTLSGVQPEDEAEYYCTLWYSNRWVFGGGTKLTVLHHHHHH

SEQ ID NO: 3283 - protein, 507 aa, synthetic construct
  REGION 1..507: note = Description of Artificial Sequence: Synthetic polypeptide
EVQLVESGGGLVQPGRSLTLSCAASTNIFSRSPMGWYRQAPGKQRELVAAIHGISTLYADSVKGRFTISRDNAKNSIYLQMNSLRPEDTALYYCNKVPWGDYHPGNVYWGQGTQVTVSSGGGGSGGGSEVQLVESGGGLVQPGNSLRLSCAASGFTFSKFGMSWVRQAPGKGLEWVSSISGSGRDTLYADSVKGRFTISRDNAKTTLYLQMNSLRPEDTAVYYCTIGGSLSVSSQGTLVTVSSGGGGSGGGSEVQLVESGGGLVQPGGSLKLSCAASGFTFNKYAINWVRQAPGKGLEWVARIRSKYNNYATYYADQVKDRFTISRDDSKNTAYLQMNNLKTEDTAVYYCVRHANFGNSYISYWAYWGQGTLVTVSSGGGGSGGGGSGGGGSQTVVTQEPSLTVSPGGTVTLTCASSTGAVTSGNYPNWVQQKPGQAPRGLIGGTKFLVPGTPARFSGSLLGGKAALTLSGVQPEDEAEYYCTLWYSNRWVFGGGTKLTVLHHHHHH

SEQ ID NO: 3284 - protein, 507 aa, synthetic construct
  REGION 1..507: note = Description of Artificial Sequence: Synthetic polypeptide
EVQLVESGGGLVQPGRSLTLSCAASTNIFSRSPMGWYRQAPGKQRELVAAIHGSSTLYADSVKGRFTISRDNAKNSIYLQMNSLRPEDTALYYCNKVPWGDYHPGNVYWGQGTQVTVSSGGGGSGGGSEVQLVESGGGLVQPGNSLRLSCAASGFTFSKFGMSWVRQAPGKGLEWVSSISGSGRDTLYADSVKGRFTISRDNAKTTLYLQMNSLRPEDTAVYYCTIGGSLSVSSQGTLVTVSSGGGGSGGGSEVQLVESGGGLVQPGGSLKLSCAASGFTFNKYAINWVRQAPGKGLEWVARIRSKYNNYATYYADQVKDRFTISRDDSKNTAYLQMNNLKTEDTAVYYCVRHANFGNSYISYWAYWGQGTLVTVSSGGGGSGGGGSGGGGSQTVVTQEPSLTVSPGGTVTLTCASSTGAVTSGNYPNWVQQKPGQAPRGLIGGTKFLVPGTPARFSGSLLGGKAALTLSGVQPEDEAEYYCTLWYSNRWVFGGGTKLTVLHHHHHH

SEQ ID NO: 3285 - protein, 507 aa, synthetic construct
  REGION 1..507: note = Description of Artificial Sequence: Synthetic polypeptide
EVQLVESGGGLVQPGRSLTLSCAASTNIFSGSPMGWYRQAPGKQRELVAAIHGNSTLYADSVKGRFTISRDNAKNSIYLQMNSLRPEDTALYYCNKVPWGDYHPGNVYWGQGTQVTVSSGGGGSGGGSEVQLVESGGGLVQPGNSLRLSCAASGFTFSKFGMSWVRQAPGKGLEWVSSISGSGRDTLYADSVKGRFTISRDNAKTTLYLQMNSLRPEDTAVYYCTIGGSLSVSSQGTLVTVSSGGGGSGGGSEVQLVESGGGLVQPGGSLKLSCAASGFTFNKYAINWVRQAPGKGLEWVARIRSKYNNYATYYADQVKDRFTISRDDSKNTAYLQMNNLKTEDTAVYYCVRHANFGNSYISYWAYWGQGTLVTVSSGGGGSGGGGSGGGGSQTVVTQEPSLTVSPGGTVTLTCASSTGAVTSGNYPNWVQQKPGQAPRGLIGGTKFLVPGTPARFSGSLLGGKAALTLSGVQPEDEAEYYCTLWYSNRWVFGGGTKLTVLHHHHHH

SEQ ID NO: 3286 - protein, 507 aa, synthetic construct
  REGION 1..507: note = Description of Artificial Sequence: Synthetic polypeptide
EVQLVESGGGLVQPGRSLTLSCAASSNIFSISPMGWYRQAPGKQRELVAAIHGSSTLYADSVKGRFTISRDNAKNSIYLQMNSLRPEDTALYYCNKVPWGDYHPGNVYWGQGTQVTVSSGGGGSGGGSEVQLVESGGGLVQPGNSLRLSCAASGFTFSKFGMSWVRQAPGKGLEWVSSISGSGRDTLYADSVKGRFTISRDNAKTTLYLQMNSLRPEDTAVYYCTIGGSLSVSSQGTLVTVSSGGGGSGGGSEVQLVESGGGLVQPGGSLKLSCAASGFTFNKYAINWVRQAPGKGLEWVARIRSKYNNYATYYADQVKDRFTISRDDSKNTAYLQMNNLKTEDTAVYYCVRHANFGNSYISYWAYWGQGTLVTVSSGGGGSGGGGSGGGGSQTVVTQEPSLTVSPGGTVTLTCASSTGAVTSGNYPNWVQQKPGQAPRGLIGGTKFLVPGTPARFSGSLLGGKAALTLSGVQPEDEAEYYCTLWYSNRWVFGGGTKLTVLHHHHHH

SEQ ID NO: 3287 - protein, 507 aa, synthetic construct
  REGION 1..507: note = Description of Artificial Sequence: Synthetic polypeptide
EVQLVESGGGLVQPGRSLTLSCAASTNIFSIYPMGWYRQAPGKQRELVAAIHGSSTLYADSVKGRFTISRDNAKNSIYLQMNSLRPEDTALYYCNKVPWGDYHPKNVYWGQGTQVTVSSGGGGSGGGSEVQLVESGGGLVQPGNSLRLSCAASGFTFSKFGMSWVRQAPGKGLEWVSSISGSGRDTLYADSVKGRFTISRDNAKTTLYLQMNSLRPEDTAVYYCTIGGSLSVSSQGTLVTVSSGGGGSGGGSEVQLVESGGGLVQPGGSLKLSCAASGFTFNKYAINWVRQAPGKGLEWVARIRSKYNNYATYYADQVKDRFTISRDDSKNTAYLQMNNLKTEDTAVYYCVRHANFGNSYISYWAYWGQGTLVTVSSGGGGSGGGGSGGGGSQTVVTQEPSLTVSPGGTVTLTCASSTGAVTSGNYPNWVQQKPGQAPRGLIGGTKFLVPGTPARFSGSLLGGKAALTLSGVQPEDEAEYYCTLWYSNRWVFGGGTKLTVLHHHHHH

SEQ ID NO: 3288 - protein, 507 aa, synthetic construct
  REGION 1..507: note = Description of Artificial Sequence: Synthetic polypeptide
EVQLVESGGGLVQPGRSLTLSCAASTNIFSKSPMGWYRQAPGKQRELVAAIHGSSTLYADSVKGRFTISRDNAKNSIYLQMNSLRPEDTALYYCNKVPWGDYHPGNVYWGQGTQVTVSSGGGGSGGGSEVQLVESGGGLVQPGNSLRLSCAASGFTFSKFGMSWVRQAPGKGLEWVSSISGSGRDTLYADSVKGRFTISRDNAKTTLYLQMNSLRPEDTAVYYCTIGGSLSVSSQGTLVTVSSGGGGSGGGSEVQLVESGGGLVQPGGSLKLSCAASGFTFNKYAINWVRQAPGKGLEWVARIRSKYNNYATYYADQVKDRFTISRDDSKNTAYLQMNNLKTEDTAVYYCVRHANFGNSYISYWAYWGQGTLVTVSSGGGGSGGGGSGGGGSQTVVTQEPSLTVSPGGTVTLTCASSTGAVTSGNYPNWVQQKPGQAPRGLIGGTKFLVPGTPARFSGSLLGGKAALTLSGVQPEDEAEYYCTLWYSNRWVFGGGTKLTVLHHHHHH

SEQ ID NO: 3289 - protein, 507 aa, synthetic construct
  REGION 1..507: note = Description of Artificial Sequence: Synthetic polypeptide
EVQLVESGGGLVQPGRSLTLSCAASTNIFSKSPMGWYRQAPGKQRELVAAIHGSSTLYADSVKGRFTISRDNAKNSIYLQMNSLRPEDTALYYCNKVPWGDYHPRNVYWGQGTQVTVSSGGGGSGGGSEVQLVESGGGLVQPGNSLRLSCAASGFTFSKFGMSWVRQAPGKGLEWVSSISGSGRDTLYADSVKGRFTISRDNAKTTLYLQMNSLRPEDTAVYYCTIGGSLSVSSQGTLVTVSSGGGGSGGGSEVQLVESGGGLVQPGGSLKLSCAASGFTFNKYAINWVRQAPGKGLEWVARIRSKYNNYATYYADQVKDRFTISRDDSKNTAYLQMNNLKTEDTAVYYCVRHANFGNSYISYWAYWGQGTLVTVSSGGGGSGGGGSGGGGSQTVVTQEPSLTVSPGGTVTLTCASSTGAVTSGNYPNWVQQKPGQAPRGLIGGTKFLVPGTPARFSGSLLGGKAALTLSGVQPEDEAEYYCTLWYSNRWVFGGGTKLTVLHHHHHH

SEQ ID NO: 3290 - protein, 507 aa, synthetic construct
  REGION 1..507: note = Description of Artificial Sequence: Synthetic polypeptide
EVQLVESGGGLVQPGRSLTLSCAASTNEFSISPMGWYRQAPGKQRELVAAIHGLSTLYADSVKGRFTISRDNAKNSIYLQMNSLRPEDTALYYCNKVPWGAYHPRNVYWGQGTQVTVSSGGGGSGGGSEVQLVESGGGLVQPGNSLRLSCAASGFTFSKFGMSWVRQAPGKGLEWVSSISGSGRDTLYADSVKGRFTISRDNAKTTLYLQMNSLRPEDTAVYYCTIGGSLSVSSQGTLVTVSSGGGGSGGGSEVQLVESGGGLVQPGGSLKLSCAASGFTFNKYAINWVRQAPGKGLEWVARIRSKYNNYATYYADQVKDRFTISRDDSKNTAYLQMNNLKTEDTAVYYCVRHANFGNSYISYWAYWGQGTLVTVSSGGGGSGGGGSGGGGSQTVVTQEPSLTVSPGGTVTLTCASSTGAVTSGNYPNWVQQKPGQAPRGLIGGTKFLVPGTPARFSGSLLGGKAALTLSGVQPEDEAEYYCTLWYSNRWVFGGGTKLTVLHHHHHH

SEQ ID NO: 3291 - protein, 507 aa, synthetic construct
  REGION 1..507: note = Description of Artificial Sequence: Synthetic polypeptide
EVQLVESGGGLVQPGRSLTLSCAASTNEFSISPMGWYRQAPGKQRELVAAIHGESTLYADSVKGRFTISRDNAKNSIYLQMNSLRPEDTALYYCNKVPWGDYHPGNVYWGQGTQVTVSSGGGGSGGGSEVQLVESGGGLVQPGNSLRLSCAASGFTFSKFGMSWVRQAPGKGLEWVSSISGSGRDTLYADSVKGRFTISRDNAKTTLYLQMNSLRPEDTAVYYCTIGGSLSVSSQGTLVTVSSGGGGSGGGSEVQLVESGGGLVQPGGSLKLSCAASGFTFNKYAINWVRQAPGKGLEWVARIRSKYNNYATYYADQVKDRFTISRDDSKNTAYLQMNNLKTEDTAVYYCVRHANFGNSYISYWAYWGQGTLVTVSSGGGGSGGGGSGGGGSQTVVTQEPSLTVSPGGTVTLTCASSTGAVTSGNYPNWVQQKPGQAPRGLIGGTKFLVPGTPARFSGSLLGGKAALTLSGVQPEDEAEYYCTLWYSNRWVFGGGTKLTVLHHHHHH

SEQ ID NO: 3292 - protein, 507 aa, synthetic construct
  REGION 1..507: note = Description of Artificial Sequence: Synthetic polypeptide
EVQLVESGGGLVQPGRSLTLSCAASTNIPSISPMGWYRQAPGKQRELVAAIHGESTLYADSVKGRFTISRDNAKNSIYLQMNSLRPEDTALYYCNKVPWGDYHPRNVAWGQGTQVTVSSGGGGSGGGSEVQLVESGGGLVQPGNSLRLSCAASGFTFSKFGMSWVRQAPGKGLEWVSSISGSGRDTLYADSVKGRFTISRDNAKTTLYLQMNSLRPEDTAVYYCTIGGSLSVSSQGTLVTVSSGGGGSGGGSEVQLVESGGGLVQPGGSLKLSCAASGFTFNKYAINWVRQAPGKGLEWVARIRSKYNNYATYYADQVKDRFTISRDDSKNTAYLQMNNLKTEDTAVYYCVRHANFGNSYISYWAYWGQGTLVTVSSGGGGSGGGGSGGGGSQTVVTQEPSLTVSPGGTVTLTCASSTGAVTSGNYPNWVQQKPGQAPRGLIGGTKFLVPGTPARFSGSLLGGKAALTLSGVQPEDEAEYYCTLWYSNRWVFGGGTKLTVLHHHHHH

SEQ ID NO: 3293 - protein, 507 aa, synthetic construct
  REGION 1..507: note = Description of Artificial Sequence: Synthetic polypeptide
EVQLVESGGGLVQPGRSLTLSCAASTNIPSISPMGWYRQAPGKQRELVAAIHGASTLYADSVKGRFTISRDNAKNSIYLQMNSLRPEDTALYYCNKVPWGDYHPRNVAWGQGTQVTVSSGGGGSGGGSEVQLVESGGGLVQPGNSLRLSCAASGFTFSKFGMSWVRQAPGKGLEWVSSISGSGRDTLYADSVKGRFTISRDNAKTTLYLQMNSLRPEDTAVYYCTIGGSLSVSSQGTLVTVSSGGGGSGGGSEVQLVESGGGLVQPGGSLKLSCAASGFTFNKYAINWVRQAPGKGLEWVARIRSKYNNYATYYADQVKDRFTISRDDSKNTAYLQMNNLKTEDTAVYYCVRHANFGNSYISYWAYWGQGTLVTVSSGGGGSGGGGSGGGGSQTVVTQEPSLTVSPGGTVTLTCASSTGAVTSGNYPNWVQQKPGQAPRGLIGGTKFLVPGTPARFSGSLLGGKAALTLSGVQPEDEAEYYCTLWYSNRWVFGGGTKLTVLHHHHHH

SEQ ID NO: 3294 - protein, 507 aa, synthetic construct
  REGION 1..507: note = Description of Artificial Sequence: Synthetic polypeptide
EVQLVESGGGLVQPGRSLTLSCAASTNIPSISPMGWYRQAPGKQRELVAAIHGESTLYADSVKGRFTISRDNAKNSIYLQMNSLRPEDTALYYCNKVPWGDYHPRNVYWGQGTQVTVSSGGGGSGGGSEVQLVESGGGLVQPGNSLRLSCAASGFTFSKFGMSWVRQAPGKGLEWVSSISGSGRDTLYADSVKGRFTISRDNAKTTLYLQMNSLRPEDTAVYYCTIGGSLSVSSQGTLVTVSSGGGGSGGGSEVQLVESGGGLVQPGGSLKLSCAASGFTFNKYAINWVRQAPGKGLEWVARIRSKYNNYATYYADQVKDRFTISRDDSKNTAYLQMNNLKTEDTAVYYCVRHANFGNSYISYWAYWGQGTLVTVSSGGGGSGGGGSGGGGSQTVVTQEPSLTVSPGGTVTLTCASSTGAVTSGNYPNWVQQKPGQAPRGLIGGTKFLVPGTPARFSGSLLGGKAALTLSGVQPEDEAEYYCTLWYSNRWVFGGGTKLTVLHHHHHH

SEQ ID NO: 3295 - protein, 507 aa, synthetic construct
  REGION 1..507: note = Description of Artificial Sequence: Synthetic polypeptide
EVQLVESGGGLVQPGRSLTLSCAASTNIPSISPMGWYRQAPGKQRELVAAIHGDSTLYADSVKGRFTISRDNAKNSIYLQMNSLRPEDTALYYCNKVPWGDYHPRNVYWGQGTQVTVSSGGGGSGGGSEVQLVESGGGLVQPGNSLRLSCAASGFTFSKFGMSWVRQAPGKGLEWVSSISGSGRDTLYADSVKGRFTISRDNAKTTLYLQMNSLRPEDTAVYYCTIGGSLSVSSQGTLVTVSSGGGGSGGGSEVQLVESGGGLVQPGGSLKLSCAASGFTFNKYAINWVRQAPGKGLEWVARIRSKYNNYATYYADQVKDRFTISRDDSKNTAYLQMNNLKTEDTAVYYCVRHANFGNSYISYWAYWGQGTLVTVSSGGGGSGGGGSGGGGSQTVVTQEPSLTVSPGGTVTLTCASSTGAVTSGNYPNWVQQKPGQAPRGLIGGTKFLVPGTPARFSGSLLGGKAALTLSGVQPEDEAEYYCTLWYSNRWVFGGGTKLTVLHHHHHH

SEQ ID NO: 3296 - protein, 507 aa, synthetic construct
  REGION 1..507: note = Description of Artificial Sequence: Synthetic polypeptide
EVQLVESGGGLVQPGRSLTLSCAASTNITSISPMGWYRQAPGKQRELVAAIHGVSTLYADSVKGRFTISRDNAKNSIYLQMNSLRPEDTALYYCNKVPWGDYHPRNVQWGQGTQVTVSSGGGGSGGGSEVQLVESGGGLVQPGNSLRLSCAASGFTFSKFGMSWVRQAPGKGLEWVSSISGSGRDTLYADSVKGRFTISRDNAKTTLYLQMNSLRPEDTAVYYCTIGGSLSVSSQGTLVTVSSGGGGSGGGSEVQLVESGGGLVQPGGSLKLSCAASGFTFNKYAINWVRQAPGKGLEWVARIRSKYNNYATYYADQVKDRFTISRDDSKNTAYLQMNNLKTEDTAVYYCVRHANFGNSYISYWAYWGQGTLVTVSSGGGGSGGGGSGGGGSQTVVTQEPSLTVSPGGTVTLTCASSTGAVTSGNYPNWVQQKPGQAPRGLIGGTKFLVPGTPARFSGSLLGGKAALTLSGVQPEDEAEYYCTLWYSNRWVFGGGTKLTVLHHHHHH

SEQ ID NO: 3297 - protein, 507 aa, synthetic construct
  REGION 1..507: note = Description of Artificial Sequence: Synthetic polypeptide
EVQLVESGGGLVQPGRSLTLSCAASTNIPSISPMGWYRQAPGKQRELVAAIHGQSTLYADSVKGRFTISRDNAKNSIYLQMNSLRPEDTALYYCNKVPWGDYHPRNVQWGQGTQVTVSSGGGGSGGGSEVQLVESGGGLVQPGNSLRLSCAASGFTFSKFGMSWVRQAPGKGLEWVSSISGSGRDTLYADSVKGRFTISRDNAKTTLYLQMNSLRPEDTAVYYCTIGGSLSVSSQGTLVTVSSGGGGSGGGSEVQLVESGGGLVQPGGSLKLSCAASGFTFNKYAINWVRQAPGKGLEWVARIRSKYNNYATYYADQVKDRFTISRDDSKNTAYLQMNNLKTEDTAVYYCVRHANFGNSYISYWAYWGQGTLVTVSSGGGGSGGGGSGGGGSQTVVTQEPSLTVSPGGTVTLTCASSTGAVTSGNYPNWVQQKPGQAPRGLIGGTKFLVPGTPARFSGSLLGGKAALTLSGVQPEDEAEYYCTLWYSNRWVFGGGTKLTVLHHHHHH

SEQ ID NO: 3298 - protein, 507 aa, synthetic construct
  REGION 1..507: note = Description of Artificial Sequence: Synthetic polypeptide
EVQLVESGGGLVQPGRSLTLSCAASTNIVSISPMGWYRQAPGKQRELVAAIHGDSTLYADSVKGRFTISRDNAKNSIYLQMNSLRPEDTALYYCNKVPWGDYHPRNVSWGQGTQVTVSSGGGGSGGGSEVQLVESGGGLVQPGNSLRLSCAASGFTFSKFGMSWVRQAPGKGLEWVSSISGSGRDTLYADSVKGRFTISRDNAKTTLYLQMNSLRPEDTAVYYCTIGGSLSVSSQGTLVTVSSGGGGSGGGSEVQLVESGGGLVQPGGSLKLSCAASGFTFNKYAINWVRQAPGKGLEWVARIRSKYNNYATYYADQVKDRFTISRDDSKNTAYLQMNNLKTEDTAVYYCVRHANFGNSYISYWAYWGQGTLVTVSSGGGGSGGGGSGGGGSQTVVTQEPSLTVSPGGTVTLTCASSTGAVTSGNYPNWVQQKPGQAPRGLIGGTKFLVPGTPARFSGSLLGGKAALTLSGVQPEDEAEYYCTLWYSNRWVFGGGTKLTVLHHHHHH

SEQ ID NO: 3299 - protein, 507 aa, synthetic construct; identical to SEQ ID NO: 3298
  REGION 1..507: note = Description of Artificial Sequence: Synthetic polypeptide

SEQ ID NO: 3300 - protein, 507 aa, synthetic construct
  REGION 1..507: note = Description of Artificial Sequence: Synthetic polypeptide
EVQLVESGGGLVQPGRSLTLSCAASSNIFSISPMGWYRQAPGKQRELVAAIHGESTLYADSVKGRFTISRDNAKNSIYLQMNSLRPEDTALYYCNKVPWGDYHPRNVTWGQGTQVTVSSGGGGSGGGSEVQLVESGGGLVQPGNSLRLSCAASGFTFSKFGMSWVRQAPGKGLEWVSSISGSGRDTLYADSVKGRFTISRDNAKTTLYLQMNSLRPEDTAVYYCTIGGSLSVSSQGTLVTVSSGGGGSGGGSEVQLVESGGGLVQPGGSLKLSCAASGFTFNKYAINWVRQAPGKGLEWVARIRSKYNNYATYYADQVKDRFTISRDDSKNTAYLQMNNLKTEDTAVYYCVRHANFGNSYISYWAYWGQGTLVTVSSGGGGSGGGGSGGGGSQTVVTQEPSLTVSPGGTVTLTCASSTGAVTSGNYPNWVQQKPGQAPRGLIGGTKFLVPGTPARFSGSLLGGKAALTLSGVQPEDEAEYYCTLWYSNRWVFGGGTKLTVLHHHHHH

SEQ ID NO: 3301 - protein, 507 aa, synthetic construct
  REGION 1..507: note = Description of Artificial Sequence: Synthetic polypeptide
EVQLVESGGGLVQPGRSLTLSCAASTNIDSISPMGWYRQAPGKQRELVAAIHGESTLYADSVKGRFTISRDNAKNSIYLQMNSLRPEDTALYYCNKVPWGDYHPRNVTWGQGTQVTVSSGGGGSGGGSEVQLVESGGGLVQPGNSLRLSCAASGFTFSKFGMSWVRQAPGKGLEWVSSISGSGRDTLYADSVKGRFTISRDNAKTTLYLQMNSLRPEDTAVYYCTIGGSLSVSSQGTLVTVSSGGGGSGGGSEVQLVESGGGLVQPGGSLKLSCAASGFTFNKYAINWVRQAPGKGLEWVARIRSKYNNYATYYADQVKDRFTISRDDSKNTAYLQMNNLKTEDTAVYYCVRHANFGNSYISYWAYWGQGTLVTVSSGGGGSGGGGSGGGGSQTVVTQEPSLTVSPGGTVTLTCASSTGAVTSGNYPNWVQQKPGQAPRGLIGGTKFLVPGTPARFSGSLLGGKAALTLSGVQPEDEAEYYCTLWYSNRWVFGGGTKLTVLHHHHHH

SEQ ID NO: 3302 - protein, 507 aa, synthetic construct
  REGION 1..507: note = Description of Artificial Sequence: Synthetic polypeptide
EVQLVESGGGLVQPGRSLTLSCAASTNIDSISPMGWYRQAPGKQRELVAAIHGSSTLYADSVKGRFTISRDNAKNSIYLQMNSLRPEDTALYYCNKVPWGDYHPRNVTWGQGTQVTVSSGGGGSGGGSEVQLVESGGGLVQPGNSLRLSCAASGFTFSKFGMSWVRQAPGKGLEWVSSISGSGRDTLYADSVKGRFTISRDNAKTTLYLQMNSLRPEDTAVYYCTIGGSLSVSSQGTLVTVSSGGGGSGGGSEVQLVESGGGLVQPGGSLKLSCAASGFTFNKYAINWVRQAPGKGLEWVARIRSKYNNYATYYADQVKDRFTISRDDSKNTAYLQMNNLKTEDTAVYYCVRHANFGNSYISYWAYWGQGTLVTVSSGGGGSGGGGSGGGGSQTVVTQEPSLTVSPGGTVTLTCASSTGAVTSGNYPNWVQQKPGQAPRGLIGGTKFLVPGTPARFSGSLLGGKAALTLSGVQPEDEAEYYCTLWYSNRWVFGGGTKLTVLHHHHHH

SEQ ID NO: 3303 - protein, 507 aa, synthetic construct
  REGION 1..507: note = Description of Artificial Sequence: Synthetic polypeptide
EVQLVESGGGLVQPGRSLTLSCAASTNIRSISPMGWYRQAPGKQRELVAAIHGSSTLYADSVKGRFTISRDNAKNSIYLQMNSLRPEDTALYYCNKVPWGDYHPRNVVWGQGTQVTVSSGGGGSGGGSEVQLVESGGGLVQPGNSLRLSCAASGFTFSKFGMSWVRQAPGKGLEWVSSISGSGRDTLYADSVKGRFTISRDNAKTTLYLQMNSLRPEDTAVYYCTIGGSLSVSSQGTLVTVSSGGGGSGGGSEVQLVESGGGLVQPGGSLKLSCAASGFTFNKYAINWVRQAPGKGLEWVARIRSKYNNYATYYADQVKDRFTISRDDSKNTAYLQMNNLKTEDTAVYYCVRHANFGNSYISYWAYWGQGTLVTVSSGGGGSGGGGSGGGGSQTVVTQEPSLTVSPGGTVTLTCASSTGAVTSGNYPNWVQQKPGQAPRGLIGGTKFLVPGTPARFSGSLLGGKAALTLSGVQPEDEAEYYCTLWYSNRWVFGGGTKLTVLHHHHHH

SEQ ID NO: 3304 - protein, 507 aa, synthetic construct
  REGION 1..507: note = Description of Artificial Sequence: Synthetic polypeptide
EVQLVESGGGLVQPGRSLTLSCAASTNITSISPMGWYRQAPGKQRELVAAISGFSTLYADSVKGRFTISRDNAKNSIYLQMNSLRPEDTALYYCNEVPWGDYHPRNVYWGQGTQVTVSSGGGGSGGGSEVQLVESGGGLVQPGNSLRLSCAASGFTFSKFGMSWVRQAPGKGLEWVSSISGSGRDTLYADSVKGRFTISRDNAKTTLYLQMNSLRPEDTAVYYCTIGGSLSVSSQGTLVTVSSGGGGSGGGSEVQLVESGGGLVQPGGSLKLSCAASGFTFNKYAINWVRQAPGKGLEWVARIRSKYNNYATYYADQVKDRFTISRDDSKNTAYLQMNNLKTEDTAVYYCVRHANFGNSYISYWAYWGQGTLVTVSSGGGGSGGGGSGGGGSQTVVTQEPSLTVSPGGTVTLTCASSTGAVTSGNYPNWVQQKPGQAPRGLIGGTKFLVPGTPARFSGSLLGGKAALTLSGVQPEDEAEYYCTLWYSNRWVFGGGTKLTVLHHHHHH

SEQ ID NO: 3305 - protein, 507 aa, synthetic construct
  REGION 1..507: note = Description of Artificial Sequence: Synthetic polypeptide
EVQLVESGGGLVQPGRSLTLSCAASTNITSISPMGWYRQAPGKQRELVAAIHGESTLYADSVKGRFTISRDNAKNSIYLQMNSLRPEDTALYYCNKVPWGDYHPRNVYWGQGTQVTVSSGGGGSGGGSEVQLVESGGGLVQPGNSLRLSCAASGFTFSKFGMSWVRQAPGKGLEWVSSISGSGRDTLYADSVKGRFTISRDNAKTTLYLQMNSLRPEDTAVYYCTIGGSLSVSSQGTLVTVSSGGGGSGGGSEVQLVESGGGLVQPGGSLKLSCAASGFTFNKYAINWVRQAPGKGLEWVARIRSKYNNYATYYADQVKDRFTISRDDSKNTAYLQMNNLKTEDTAVYYCVRHANFGNSYISYWAYWGQGTLVTVSSGGGGSGGGGSGGGGSQTVVTQEPSLTVSPGGTVTLTCASSTGAVTSGNYPNWVQQKPGQAPRGLIGGTKFLVPGTPARFSGSLLGGKAALTLSGVQPEDEAEYYCTLWYSNRWVFGGGTKLTVLHHHHHH

SEQ ID NO: 3306 - protein, 507 aa, synthetic construct
  REGION 1..507: note = Description of Artificial Sequence: Synthetic polypeptide
EVQLVESGGGLVQPGRSLTLSCAASTNITSVSPMGWYRQAPGKQRELVAAIHGPSTLYADSVKGRFTISRDNAKNSIYLQMNSLRPEDTALYYCNKVPWGDYHPTNVYWGQGTQVTVSSGGGGSGGGSEVQLVESGGGLVQPGNSLRLSCAASGFTFSKFGMSWVRQAPGKGLEWVSSISGSGRDTLYADSVKGRFTISRDNAKTTLYLQMNSLRPEDTAVYYCTIGGSLSVSSQGTLVTVSSGGGGSGGGSEVQLVESGGGLVQPGGSLKLSCAASGFTFNKYAINWVRQAPGKGLEWVARIRSKYNNYATYYADQVKDRFTISRDDSKNTAYLQMNNLKTEDTAVYYCVRHANFGNSYISYWAYWGQGTLVTVSSGGGGSGGGGSGGGGSQTVVTQEPSLTVSPGGTVTLTCASSTGAVTSGNYPNWVQQKPGQAPRGLIGGTKFLVPGTPARFSGSLLGGKAALTLSGVQPEDEAEYYCTLWYSNRWVFGGGTKLTVLHHHHHH

SEQ ID NO: 3307 - protein, 507 aa, synthetic construct
  REGION 1..507: note = Description of Artificial Sequence: Synthetic polypeptide
EVQLVESGGGLVQPGRSLTLSCAASTNIGSISPMGWYRQAPGKQRELVAAIHGQSTLYADSVKGRFTISRDNAKNSIYLQMNSLRPEDTALYYCNKVPWGDYHPQNVYWGQGTQVTVSSGGGGSGGGSEVQLVESGGGLVQPGNSLRLSCAASGFTFSKFGMSWVRQAPGKGLEWVSSISGSGRDTLYADSVKGRFTISRDNAKTTLYLQMNSLRPEDTAVYYCTIGGSLSVSSQGTLVTVSSGGGGSGGGSEVQLVESGGGLVQPGGSLKLSCAASGFTFNKYAINWVRQAPGKGLEWVARIRSKYNNYATYYADQVKDRFTISRDDSKNTAYLQMNNLKTEDTAVYYCVRHANFGNSYISYWAYWGQGTLVTVSSGGGGSGGGGSGGGGSQTVVTQEPSLTVSPGGTVTLTCASSTGAVTSGNYPNWVQQKPGQAPRGLIGGTKFLVPGTPARFSGSLLGGKAALTLSGVQPEDEAEYYCTLWYSNRWVFGGGTKLTVLHHHHHH

SEQ ID NO: 3308 - protein, 507 aa, synthetic construct
  REGION 1..507: note = Description of Artificial Sequence: Synthetic polypeptide
EVQLVESGGGLVQPGRSLTLSCAASTNIESISPMGWYRQAPGKQRELVAAIHGKSTLYADSVKGRFTISRDNAKNSIYLQMNSLRPEDTALYYCNKVPWGDYHPRRVYWGQGTQVTVSSGGGGSGGGSEVQLVESGGGLVQPGNSLRLSCAASGFTFSKFGMSWVRQAPGKGLEWVSSISGSGRDTLYADSVKGRFTISRDNAKTTLYLQMNSLRPEDTAVYYCTIGGSLSVSSQGTLVTVSSGGGGSGGGSEVQLVESGGGLVQPGGSLKLSCAASGFTFNKYAINWVRQAPGKGLEWVARIRSKYNNYATYYADQVKDRFTISRDDSKNTAYLQMNNLKTEDTAVYYCVRHANFGNSYISYWAYWGQGTLVTVSSGGGGSGGGGSGGGGSQTVVTQEPSLTVSPGGTVTLTCASSTGAVTSGNYPNWVQQKPGQAPRGLIGGTKFLVPGTPARFSGSLLGGKAALTLSGVQPEDEAEYYCTLWYSNRWVFGGGTKLTVLHHHHHH

SEQ ID NO: 3309 - protein, 507 aa, synthetic construct
  REGION 1..507: note = Description of Artificial Sequence: Synthetic polypeptide
EVQLVESGGGLVQPGRSLTLSCAASTNIVSISPMGWYRQAPGKQRELVAAIHGDSTLYADSVKGRFTISRDNAKNSIYLQMNSLRPEDTALYYCNKVPWGDYHPRRVYWGQGTQVTVSSGGGGSGGGSEVQLVESGGGLVQPGNSLRLSCAASGFTFSKFGMSWVRQAPGKGLEWVSSISGSGRDTLYADSVKGRFTISRDNAKTTLYLQMNSLRPEDTAVYYCTIGGSLSVSSQGTLVTVSSGGGGSGGGSEVQLVESGGGLVQPGGSLKLSCAASGFTFNKYAINWVRQAPGKGLEWVARIRSKYNNYATYYADQVKDRFTISRDDSKNTAYLQMNNLKTEDTAVYYCVRHANFGNSYISYWAYWGQGTLVTVSSGGGGSGGGGSGGGGSQTVVTQEPSLTVSPGGTVTLTCASSTGAVTSGNYPNWVQQKPGQAPRGLIGGTKFLVPGTPARFSGSLLGGKAALTLSGVQPEDEAEYYCTLWYSNRWVFGGGTKLTVLHHHHHH

SEQ ID NO: 3310 - protein, 507 aa, synthetic construct
  REGION 1..507: note = Description of Artificial Sequence: Synthetic polypeptide
EVQLVESGGGLVQPGRSLTLSCAASTNIDSISPMGWYRQAPGKQRELVAAIHGNSTLYADSVKGRFTISRDNAKNSIYLQMNSLRPEDTALYYCNKVPWGDYHPRMVYWGQGTQVTVSSGGGGSGGGSEVQLVESGGGLVQPGNSLRLSCAASGFTFSKFGMSWVRQAPGKGLEWVSSISGSGRDTLYADSVKGRFTISRDNAKTTLYLQMNSLRPEDTAVYYCTIGGSLSVSSQGTLVTVSSGGGGSGGGSEVQLVESGGGLVQPGGSLKLSCAASGFTFNKYAINWVRQAPGKGLEWVARIRSKYNNYATYYADQVKDRFTISRDDSKNTAYLQMNNLKTEDTAVYYCVRHANFGNSYISYWAYWGQGTLVTVSSGGGGSGGGGSGGGGSQTVVTQEPSLTVSPGGTVTLTCASSTGAVTSGNYPNWVQQKPGQAPRGLIGGTKFLVPGTPARFSGSLLGGKAALTLSGVQPEDEAEYYCTLWYSNRWVFGGGTKLTVLHHHHHH

SEQ ID NO: 3311 - protein, 507 aa, synthetic construct
  REGION 1..507: note = Description of Artificial Sequence: Synthetic polypeptide
EVQLVESGGGLVQPGRSLTLSCAASTNIFMISPMGWYRQAPGKQRELVAAIHGDSTLYADSVKGRFTISRDNAKNSIYLQMNSLRPEDTALYYCNKVPWGRYHPRNVYWGQGTQVTVSSGGGGSGGGSEVQLVESGGGLVQPGNSLRLSCAASGFTFSKFGMSWVRQAPGKGLEWVSSISGSGRDTLYADSVKGRFTISRDNAKTTLYLQMNSLRPEDTAVYYCTIGGSLSVSSQGTLVTVSSGGGGSGGGSEVQLVESGGGLVQPGGSLKLSCAASGFTFNKYAINWVRQAPGKGLEWVARIRSKYNNYATYYADQVKDRFTISRDDSKNTAYLQMNNLKTEDTAVYYCVRHANFGNSYISYWAYWGQGTLVTVSSGGGGSGGGGSGGGGSQTVVTQEPSLTVSPGGTVTLTCASSTGAVTSGNYPNWVQQKPGQAPRGLIGGTKFLVPGTPARFSGSLLGGKAALTLSGVQPEDEAEYYCTLWYSNRWVFGGGTKLTVLHHHHHH

SEQ ID NO: 3312 - protein, 507 aa, synthetic construct
  REGION 1..507: note = Description of Artificial Sequence: Synthetic polypeptide
EVQLVESGGGLVQPGRSLTLSCAASTNIFRISPMGWYRQAPGKQRELVAAIHGDSTLYADSVKGRFTISRDNAKNSIYLQMNSLRPEDTALYYCNKVPWGRYHPRNVYWGQGTQVTVSSGGGGSGGGSEVQLVESGGGLVQPGNSLRLSCAASGFTFSKFGMSWVRQAPGKGLEWVSSISGSGRDTLYADSVKGRFTISRDNAKTTLYLQMNSLRPEDTAVYYCTIGGSLSVSSQGTLVTVSSGGGGSGGGSEVQLVESGGGLVQPGGSLKLSCAASGFTFNKYAINWVRQAPGKGLEWVARIRSKYNNYATYYADQVKDRFTISRDDSKNTAYLQMNNLKTEDTAVYYCVRHANFGNSYISYWAYWGQGTLVTVSSGGGGSGGGGSGGGGSQTVVTQEPSLTVSPGGTVTLTCASSTGAVTSGNYPNWVQQKPGQAPRGLIGGTKFLVPGTPARFSGSLLGGKAALTLSGVQPEDEAEYYCTLWYSNRWVFGGGTKLTVLHHHHHH

SEQ ID NO: 3313 - protein, 507 aa, synthetic construct
  REGION 1..507: note = Description of Artificial Sequence: Synthetic polypeptide
EVQLVESGGGLVQPGRSLTLSCAASTNIFSISPMGWYRQAPGKQRELVAAIHGDSTLYADSVKGRFTISRDNAKNSIYLQMNSLRPEDTALYYCNKVPWGEYHPRNVYWGQGTQVTVSSGGGGSGGGSEVQLVESGGGLVQPGNSLRLSCAASGFTFSKFGMSWVRQAPGKGLEWVSSISGSGRDTLYADSVKGRFTISRDNAKTTLYLQMNSLRPEDTAVYYCTIGGSLSVSSQGTLVTVSSGGGGSGGGSEVQLVESGGGLVQPGGSLKLSCAASGFTFNKYAINWVRQAPGKGLEWVARIRSKYNNYATYYADQVKDRFTISRDDSKNTAYLQMNNLKTEDTAVYYCVRHANFGNSYISYWAYWGQGTLVTVSSGGGGSGGGGSGGGGSQTVVTQEPSLTVSPGGTVTLTCASSTGAVTSGNYPNWVQQKPGQAPRGLIGGTKFLVPGTPARFSGSLLGGKAALTLSGVQPEDEAEYYCTLWYSNRWVFGGGTKLTVLHHHHHH

SEQ ID NO: 3314 - protein, 507 aa, synthetic construct
  REGION 1..507: note = Description of Artificial Sequence: Synthetic polypeptide
EVQLVESGGGLVQPGRSLTLSCAASTNIFSISPMGWYRQAPGKQRELVAAIHGDSTLYADSVKGRFTISRDNAKNSIYLQMNSLRPEDTALYYCNKVPWGKYHPRNVYWGQGTQVTVSSGGGGSGGGSEVQLVESGGGLVQPGNSLRLSCAASGFTFSKFGMSWVRQAPGKGLEWVSSISGSGRDTLYADSVKGRFTISRDNAKTTLYLQMNSLRPEDTAVYYCTIGGSLSVSSQGTLVTVSSGGGGSGGGSEVQLVESGGGLVQPGGSLKLSCAASGFTFNKYAINWVRQAPGKGLEWVARIRSKYNNYATYYADQVKDRFTISRDDSKNTAYLQMNNLKTEDTAVYYCVRHANFGNSYISYWAYWGQGTLVTVSSGGGGSGGGGSGGGGSQTVVTQEPSLTVSPGGTVTLTCASSTGAVTSGNYPNWVQQKPGQAPRGLIGGTKFLVPGTPARFSGSLLGGKAALTLSGVQPEDEAEYYCTLWYSNRWVFGGGTKLTVLHHHHHH

SEQ ID NO: 3315 - protein, 507 aa, synthetic construct
  REGION 1..507: note = Description of Artificial Sequence: Synthetic polypeptide
EVQLVESGGGLVQPGRSLTLSCAASTNIESISPMGWYRQAPGKQRELVAAIHGSSTLYADSVKGRFTISRDNAKNSIYLQMNSLRPEDTALYYCNKVPWGRYHPRNVYWGQGTQVTVSSGGGGSGGGSEVQLVESGGGLVQPGNSLRLSCAASGFTFSKFGMSWVRQAPGKGLEWVSSISGSGRDTLYADSVKGRFTISRDNAKTTLYLQMNSLRPEDTAVYYCTIGGSLSVSSQGTLVTVSSGGGGSGGGSEVQLVESGGGLVQPGGSLKLSCAASGFTFNKYAINWVRQAPGKGLEWVARIRSKYNNYATYYADQVKDRFTISRDDSKNTAYLQMNNLKTEDTAVYYCVRHANFGNSYISYWAYWGQGTLVTVSSGGGGSGGGGSGGGGSQTVVTQEPSLTVSPGGTVTLTCASSTGAVTSGNYPNWVQQKPGQAPRGLIGGTKFLVPGTPARFSGSLLGGKAALTLSGVQPEDEAEYYCTLWYSNRWVFGGGTKLTVLHHHHHH

SEQ ID NO: 3316 - protein, 507 aa, synthetic construct
  REGION 1..507: note = Description of Artificial Sequence: Synthetic polypeptide
EVQLVESGGGLVQPGRSLTLSCAASTNIESISPMGWYRQAPGKQRELVAAIHGNSTLYADSVKGRFTISRDNAKNSIYLQMNSLRPEDTALYYCNKVPWGRYHPRNVYWGQGTQVTVSSGGGGSGGGSEVQLVESGGGLVQPGNSLRLSCAASGFTFSKFGMSWVRQAPGKGLEWVSSISGSGRDTLYADSVKGRFTISRDNAKTTLYLQMNSLRPEDTAVYYCTIGGSLSVSSQGTLVTVSSGGGGSGGGSEVQLVESGGGLVQPGGSLKLSCAASGFTFNKYAINWVRQAPGKGLEWVARIRSKYNNYATYYADQVKDRFTISRDDSKNTAYLQMNNLKTEDTAVYYCVRHANFGNSYISYWAYWGQGTLVTVSSGGGGSGGGGSGGGGSQTVVTQEPSLTVSPGGTVTLTCASSTGAVTSGNYPNWVQQKPGQAPRGLIGGTKFLVPGTPARFSGSLLGGKAALTLSGVQPEDEAEYYCTLWYSNRWVFGGGTKLTVLHHHHHH

SEQ ID NO: 3317 - protein, 507 aa, synthetic construct
  REGION 1..507: note = Description of Artificial Sequence: Synthetic polypeptide
EVQLVESGGGLVQPGRSLTLSCAASTNISSISPMGWYRQAPGKQRELVAAIHGFSTLYADSVKGRFTISRDNAKNSIYLQMNSLRPEDTALYYCNKVPWGYYHPRNVYWGQGTQVTVSSGGGGSGGGSEVQLVESGGGLVQPGNSLRLSCAASGFTFSKFGMSWVRQAPGKGLEWVSSISGSGRDTLYADSVKGRFTISRDNAKTTLYLQMNSLRPEDTAVYYCTIGGSLSVSSQGTLVTVSSGGGGSGGGSEVQLVESGGGLVQPGGSLKLSCAASGFTFNKYAINWVRQAPGKGLEWVARIRSKYNNYATYYADQVKDRFTISRDDSKNTAYLQMNNLKTEDTAVYYCVRHANFGNSYISYWAYWGQGTLVTVSSGGGGSGGGGSGGGGSQTVVTQEPSLTVSPGGTVTLTCASSTGAVTSGNYPNWVQQKPGQAPRGLIGGTKFLVPGTPARFSGSLLGGKAALTLSGVQPEDEAEYYCTLWYSNRWVFGGGTKLTVLHHHHHH

SEQ ID NO: 3318 - protein, 507 aa, synthetic construct
  REGION 1..507: note = Description of Artificial Sequence: Synthetic polypeptide
EVQLVESGGGLVQPGRSLTLSCAASTNISSISPMGWYRQAPGKQRELVAAIHGHSTLYADSVKGRFTISRDNAKNSIYLQMNSLRPEDTALYYCNKVPWGRYHPRNVYWGQGTQVTVSSGGGGSGGGSEVQLVESGGGLVQPGNSLRLSCAASGFTFSKFGMSWVRQAPGKGLEWVSSISGSGRDTLYADSVKGRFTISRDNAKTTLYLQMNSLRPEDTAVYYCTIGGSLSVSSQGTLVTVSSGGGGSGGGSEVQLVESGGGLVQPGGSLKLSCAASGFTFNKYAINWVRQAPGKGLEWVARIRSKYNNYATYYADQVKDRFTISRDDSKNTAYLQMNNLKTEDTAVYYCVRHANFGNSYISYWAYWGQGTLVTVSSGGGGSGGGGSGGGGSQTVVTQEPSLTVSPGGTVTLTCASSTGAVTSGNYPNWVQQKPGQAPRGLIGGTKFLVPGTPARFSGSLLGGKAALTLSGVQPEDEAEYYCTLWYSNRWVFGGGTKLTVLHHHHHH

SEQ ID NO: 3319 - protein, 507 aa, synthetic construct
  REGION 1..507: note = Description of Artificial Sequence: Synthetic polypeptide
EVQLVESGGGLVQPGRSLTLSCAASTNISSISPMGWYRQAPGKQRELVAAIHGFSTVYADSVKGRFTISRDNAKNSIYLQMNSLRPEDTALYYCNKVPWGRYHPRNVYWGQGTQVTVSSGGGGSGGGSEVQLVESGGGLVQPGNSLRLSCAASGFTFSKFGMSWVRQAPGKGLEWVSSISGSGRDTLYADSVKGRFTISRDNAKTTLYLQMNSLRPEDTAVYYCTIGGSLSVSSQGTLVTVSSGGGGSGGGSEVQLVESGGGLVQPGGSLKLSCAASGFTFNKYAINWVRQAPGKGLEWVARIRSKYNNYATYYADQVKDRFTISRDDSKNTAYLQMNNLKTEDTAVYYCVRHANFGNSYISYWAYWGQGTLVTVSSGGGGSGGGGSGGGGSQTVVTQEPSLTVSPGGTVTLTCASSTGAVTSGNYPNWVQQKPGQAPRGLIGGTKFLVPGTPARFSGSLLGGKAALTLSGVQPEDEAEYYCTLWYSNRWVFGGGTKLTVLHHHHHH

SEQ ID NO: 3320 - protein, 507 aa, synthetic construct
  REGION 1..507: note = Description of Artificial Sequence: Synthetic polypeptide
EVQLVESGGGLVQPGRSLTLSCAASTNIFSIRPMGWYRQAPGKQRELVAAIHGFSTVYADSVKGRFTISRDNAKNSIYLQMNSLRPEDTALYYCNKVPWGDYHPRNVYWGQGTQVTVSSGGGGSGGGSEVQLVESGGGLVQPGNSLRLSCAASGFTFSKFGMSWVRQAPGKGLEWVSSISGSGRDTLYADSVKGRFTISRDNAKTTLYLQMNSLRPEDTAVYYCTIGGSLSVSSQGTLVTVSSGGGGSGGGSEVQLVESGGGLVQPGGSLKLSCAASGFTFNKYAINWVRQAPGKGLEWVARIRSKYNNYATYYADQVKDRFTISRDDSKNTAYLQMNNLKTEDTAVYYCVRHANFGNSYISYWAYWGQGTLVTVSSGGGGSGGGGSGGGGSQTVVTQEPSLTVSPGGTVTLTCASSTGAVTSGNYPNWVQQKPGQAPRGLIGGTKFLVPGTPARFSGSLLGGKAALTLSGVQPEDEAEYYCTLWYSNRWVFGGGTKLTVLHHHHHH

SEQ ID NO: 3321 - protein, 507 aa, synthetic construct
  REGION 1..507: note = Description of Artificial Sequence: Synthetic polypeptide
EVQLVESGGGLVQPGRSLTLSCAASTNIFSIYPMGWYRQAPGKQRELVAAIHGFSTYYADSVKGRFTISRDNAKNSIYLQMNSLRPEDTALYYCNKVPWGSYHPRNVYWGQGTQVTVSSGGGGSGGGSEVQLVESGGGLVQPGNSLRLSCAASGFTFSKFGMSWVRQAPGKGLEWVSSISGSGRDTLYADSVKGRFTISRDNAKTTLYLQMNSLRPEDTAVYYCTIGGSLSVSSQGTLVTVSSGGGGSGGGSEVQLVESGGGLVQPGGSLKLSCAASGFTFNKYAINWVRQAPGKGLEWVARIRSKYNNYATYYADQVKDRFTISRDDSKNTAYLQMNNLKTEDTAVYYCVRHANFGNSYISYWAYWGQGTLVTVSSGGGGSGGGGSGGGGSQTVVTQEPSLTVSPGGTVTLTCASSTGAVTSGNYPNWVQQKPGQAPRGLIGGTKFLVPGTPARFSGSLLGGKAALTLSGVQPEDEAEYYCTLWYSNRWVFGGGTKLTVLHHHHHH

SEQ ID NO: 3322 - protein, 507 aa, synthetic construct
  REGION 1..507: note = Description of Artificial Sequence: Synthetic polypeptide
EVQLVESGGGLVQPGRSLTLSCAASTNIFNISPMGWYRQAPGKQRELVAAIHGFSTYYADSVKGRFTISRDNAKNSIYLQMNSLRPEDTALYYCNKVPWGRYHPRNVYWGQGTQVTVSSGGGGSGGGSEVQLVESGGGLVQPGNSLRLSCAASGFTFSKFGMSWVRQAPGKGLEWVSSISGSGRDTLYADSVKGRFTISRDNAKTTLYLQMNSLRPEDTAVYYCTIGGSLSVSSQGTLVTVSSGGGGSGGGSEVQLVESGGGLVQPGGSLKLSCAASGFTFNKYAINWVRQAPGKGLEWVARIRSKYNNYATYYADQVKDRFTISRDDSKNTAYLQMNNLKTEDTAVYYCVRHANFGNSYISYWAYWGQGTLVTVSSGGGGSGGGGSGGGGSQTVVTQEPSLTVSPGGTVTLTCASSTGAVTSGNYPNWVQQKPGQAPRGLIGGTKFLVPGTPARFSGSLLGGKAALTLSGVQPEDEAEYYCTLWYSNRWVFGGGTKLTVLHHHHHH

SEQ ID NO: 3323 - protein, 507 aa, synthetic construct
  REGION 1..507: note = Description of Artificial Sequence: Synthetic polypeptide
EVQLVESGGGLVQPGRSLTLSCAASTNIFSSSPMGWYRQAPGKQRELVAAIHGFSTWYADSVKGRFTISRDNAKNSIYLQMNSLRPEDTALYYCNKVPWGRYHPRNVYWGQGTQVTVSSGGGGSGGGSEVQLVESGGGLVQPGNSLRLSCAASGFTFSKFGMSWVRQAPGKGLEWVSSISGSGRDTLYADSVKGRFTISRDNAKTTLYLQMNSLRPEDTAVYYCTIGGSLSVSSQGTLVTVSSGGGGSGGGSEVQLVESGGGLVQPGGSLKLSCAASGFTFNKYAINWVRQAPGKGLEWVARIRSKYNNYATYYADQVKDRFTISRDDSKNTAYLQMNNLKTEDTAVYYCVRHANFGNSYISYWAYWGQGTLVTVSSGGGGSGGGGSGGGGSQTVVTQEPSLTVSPGGTVTLTCASSTGAVTSGNYPNWVQQKPGQAPRGLIGGTKFLVPGTPARFSGSLLGGKAALTLSGVQPEDEAEYYCTLWYSNRWVFGGGTKLTVLHHHHHH

SEQ ID NO: 3324 - protein, 507 aa, synthetic construct
  REGION 1..507: note = Description of Artificial Sequence: Synthetic polypeptide
EVQLVESGGGLVQPGRSLTLSCAASTNISSISPMGWYRQAPGKQRELVAAIHGFDTLYADSVKGRFTISRDNAKNSIYLQMNSLRPEDTALYYCNKVPWGDYHPRNVYWGQGTQVTVSSGGGGSGGGSEVQLVESGGGLVQPGNSLRLSCAASGFTFSKFGMSWVRQAPGKGLEWVSSISGSGRDTLYADSVKGRFTISRDNAKTTLYLQMNSLRPEDTAVYYCTIGGSLSVSSQGTLVTVSSGGGGSGGGSEVQLVESGGGLVQPGGSLKLSCAASGFTFNKYAINWVRQAPGKGLEWVARIRSKYNNYATYYADQVKDRFTISRDDSKNTAYLQMNNLKTEDTAVYYCVRHANFGNSYISYWAYWGQGTLVTVSSGGGGSGGGGSGGGGSQTVVTQEPSLTVSPGGTVTLTCASSTGAVTSGNYPNWVQQKPGQAPRGLIGGTKFLVPGTPARFSGSLLGGKAALTLSGVQPEDEAEYYCTLWYSNRWVFGGGTKLTVLHHHHHH

SEQ ID NO: 3325 - protein, 507 aa, synthetic construct
  REGION 1..507: note = Description of Artificial Sequence: Synthetic polypeptide
EVQLVESGGGLVQPGRSLTLSCAASTNIFSINPMGWYRQAPGKQRELVAAIHGFDTLYADSVKGRFTISRDNAKNSIYLQMNSLRPEDTALYYCNKVPWGDYHPRNVSWGQGTQVTVSSGGGGSGGGSEVQLVESGGGLVQPGNSLRLSCAASGFTFSKFGMSWVRQAPGKGLEWVSSISGSGRDTLYADSVKGRFTISRDNAKTTLYLQMNSLRPEDTAVYYCTIGGSLSVSSQGTLVTVSSGGGGSGGGSEVQLVESGGGLVQPGGSLKLSCAASGFTFNKYAINWVRQAPGKGLEWVARIRSKYNNYATYYADQVKDRFTISRDDSKNTAYLQMNNLKTEDTAVYYCVRHANFGNSYISYWAYWGQGTLVTVSSGGGGSGGGGSGGGGSQTVVTQEPSLTVSPGGTVTLTCASSTGAVTSGNYPNWVQQKPGQAPRGLIGGTKFLVPGTPARFSGSLLGGKAALTLSGVQPEDEAEYYCTLWYSNRWVFGGGTKLTVLHHHHHH

SEQ ID NO: 3326 - protein, 507 aa, synthetic construct
  REGION 1..507: note = Description of Artificial Sequence: Synthetic polypeptide
EVQLVESGGGLVQPGRSLTLSCAASTNIFSITPMGWYRQAPGKQRELVAAIHGRSTLYADSVKGRFTISRDNAKNSIYLQMNSLRPEDTALYYCNKVPWGSYHPRNVYWGQGTQVTVSSGGGGSGGGSEVQLVESGGGLVQPGNSLRLSCAASGFTFSKFGMSWVRQAPGKGLEWVSSISGSGRDTLYADSVKGRFTISRDNAKTTLYLQMNSLRPEDTAVYYCTIGGSLSVSSQGTLVTVSSGGGGSGGGSEVQLVESGGGLVQPGGSLKLSCAASGFTFNKYAINWVRQAPGKGLEWVARIRSKYNNYATYYADQVKDRFTISRDDSKNTAYLQMNNLKTEDTAVYYCVRHANFGNSYISYWAYWGQGTLVTVSSGGGGSGGGGSGGGGSQTVVTQEPSLTVSPGGTVTLTCASSTGAVTSGNYPNWVQQKPGQAPRGLIGGTKFLVPGTPARFSGSLLGGKAALTLSGVQPEDEAEYYCTLWYSNRWVFGGGTKLTVLHHHHHH

SEQ ID NO: 3327 - protein, 507 aa, synthetic construct
  REGION 1..507: note = Description of Artificial Sequence: Synthetic polypeptide
EVQLVESGGGLVQPGRSLTLSCAASTNIFSITPMGWYRQAPGKQRELVAAIHGTSTLYADSVKGRFTISRDNAKNSIYLQMNSLRPEDTALYYCNKVPWGRYHPRNVYWGQGTQVTVSSGGGGSGGGSEVQLVESGGGLVQPGNSLRLSCAASGFTFSKFGMSWVRQAPGKGLEWVSSISGSGRDTLYADSVKGRFTISRDNAKTTLYLQMNSLRPEDTAVYYCTIGGSLSVSSQGTLVTVSSGGGGSGGGSEVQLVESGGGLVQPGGSLKLSCAASGFTFNKYAINWVRQAPGKGLEWVARIRSKYNNYATYYADQVKDRFTISRDDSKNTAYLQMNNLKTEDTAVYYCVRHANFGNSYISYWAYWGQGTLVTVSSGGGGSGGGGSGGGGSQTVVTQEPSLTVSPGGTVTLTCASSTGAVTSGNYPNWVQQKPGQAPRGLIGGTKFLVPGTPARFSGSLLGGKAALTLSGVQPEDEAEYYCTLWYSNRWVFGGGTKLTVLHHHHHH

SEQ ID NO: 3328 - protein, 507 aa, synthetic construct
  REGION 1..507: note = Description of Artificial Sequence: Synthetic polypeptide
EVQLVESGGGLVQPGRSLTLSCAASTNIFSITPMGWYRQAPGKQRELVAAIHGESTLYADSVKGRFTISRDNAKNSIYLQMNSLRPEDTALYYCNKVPWGRYHPRNVYWGQGTQVTVSSGGGGSGGGSEVQLVESGGGLVQPGNSLRLSCAASGFTFSKFGMSWVRQAPGKGLEWVSSISGSGRDTLYADSVKGRFTISRDNAKTTLYLQMNSLRPEDTAVYYCTIGGSLSVSSQGTLVTVSSGGGGSGGGSEVQLVESGGGLVQPGGSLKLSCAASGFTFNKYAINWVRQAPGKGLEWVARIRSKYNNYATYYADQVKDRFTISRDDSKNTAYLQMNNLKTEDTAVYYCVRHANFGNSYISYWAYWGQGTLVTVSSGGGGSGGGGSGGGGSQTVVTQEPSLTVSPGGTVTLTCASSTGAVTSGNYPNWVQQKPGQAPRGLIGGTKFLVPGTPARFSGSLLGGKAALTLSGVQPEDEAEYYCTLWYSNRWVFGGGTKLTVLHHHHHH

SEQ ID NO: 3329 - protein, 507 aa, synthetic construct
  REGION 1..507: note = Description of Artificial Sequence: Synthetic polypeptide
EVQLVESGGGLVQPGRSLTLSCAASTNIFSITPMGWYRQAPGKQRELVAAIHGESTLYADSVKGRFTISRDNAKNSIYLQMNSLRPEDTALYYCNKVPWGDYHPRDVYWGQGTQVTVSSGGGGSGGGSEVQLVESGGGLVQPGNSLRLSCAASGFTFSKFGMSWVRQAPGKGLEWVSSISGSGRDTLYADSVKGRFTISRDNAKTTLYLQMNSLRPEDTAVYYCTIGGSLSVSSQGTLVTVSSGGGGSGGGSEVQLVESGGGLVQPGGSLKLSCAASGFTFNKYAINWVRQAPGKGLEWVARIRSKYNNYATYYADQVKDRFTISRDDSKNTAYLQMNNLKTEDTAVYYCVRHANFGNSYISYWAYWGQGTLVTVSSGGGGSGGGGSGGGGSQTVVTQEPSLTVSPGGTVTLTCASSTGAVTSGNYPNWVQQKPGQAPRGLIGGTKFLVPGTPARFSGSLLGGKAALTLSGVQPEDEAEYYCTLWYSNRWVFGGGTKLTVLHHHHHH

SEQ ID NO: 3330 - protein, 507 aa, synthetic construct
  REGION 1..507: note = Description of Artificial Sequence: Synthetic polypeptide
EVQLVESGGGLVQPGRSLTLSCAASTNIFSTSPYGWYRQAPGKQRELVAAIHGFSTIYADSVKGRFTISRDNAKNSIYLQMNSLRPEDTALYYCNKVPWGDYHPGNVYWGQGTQVTVSSGGGGSGGGSEVQLVESGGGLVQPGNSLRLSCAASGFTFSKFGMSWVRQAPGKGLEWVSSISGSGRDTLYADSVKGRFTISRDNAKTTLYLQMNSLRPEDTAVYYCTIGGSLSVSSQGTLVTVSSGGGGSGGGSEVQLVESGGGLVQPGGSLKLSCAASGFTFNKYAINWVRQAPGKGLEWVARIRSKYNNYATYYADQVKDRFTISRDDSKNTAYLQMNNLKTEDTAVYYCVRHANFGNSYISYWAYWGQGTLVTVSSGGGGSGGGGSGGGGSQTVVTQEPSLTVSPGGTVTLTCASSTGAVTSGNYPNWVQQKPGQAPRGLIGGTKFLVPGTPARFSGSLLGGKAALTLSGVQPEDEAEYYCTLWYSNRWVFGGGTKLTVLHHHHHH

SEQ ID NO: 3331 - protein, 507 aa, synthetic construct
  REGION 1..507: note = Description of Artificial Sequence: Synthetic polypeptide
EVQLVESGGGLVQPGRSLTLSCAASTNIFSTSPGGWYRQAPGKQRELVAAIHGFSTIYADSVKGRFTISRDNAKNSIYLQMNSLRPEDTALYYCNKVPWGDYHPGNVYWGQGTQVTVSSGGGGSGGGSEVQLVESGGGLVQPGNSLRLSCAASGFTFSKFGMSWVRQAPGKGLEWVSSISGSGRDTLYADSVKGRFTISRDNAKTTLYLQMNSLRPEDTAVYYCTIGGSLSVSSQGTLVTVSSGGGGSGGGSEVQLVESGGGLVQPGGSLKLSCAASGFTFNKYAINWVRQAPGKGLEWVARIRSKYNNYATYYADQVKDRFTISRDDSKNTAYLQMNNLKTEDTAVYYCVRHANFGNSYISYWAYWGQGTLVTVSSGGGGSGGGGSGGGGSQTVVTQEPSLTVSPGGTVTLTCASSTGAVTSGNYPNWVQQKPGQAPRGLIGGTKFLVPGTPARFSGSLLGGKAALTLSGVQPEDEAEYYCTLWYSNRWVFGGGTKLTVLHHHHHH

SEQ ID NO: 3332 - protein, 507 aa, synthetic construct
  REGION 1..507: note = Description of Artificial Sequence: Synthetic polypeptide
EVQLVESGGGLVQPGRSLTLSCAASTNIFSITPYGWYRQAPGKQRELVAAIHGASTLYADSVKGRFTISRDNAKNSIYLQMNSLRPEDTALYYCNKVPWGDYHPGNVYWGQGTQVTVSSGGGGSGGGSEVQLVESGGGLVQPGNSLRLSCAASGFTFSKFGMSWVRQAPGKGLEWVSSISGSGRDTLYADSVKGRFTISRDNAKTTLYLQMNSLRPEDTAVYYCTIGGSLSVSSQGTLVTVSSGGGGSGGGSEVQLVESGGGLVQPGGSLKLSCAASGFTFNKYAINWVRQAPGKGLEWVARIRSKYNNYATYYADQVKDRFTISRDDSKNTAYLQMNNLKTEDTAVYYCVRHANFGNSYISYWAYWGQGTLVTVSSGGGGSGGGGSGGGGSQTVVTQEPSLTVSPGGTVTLTCASSTGAVTSGNYPNWVQQKPGQAPRGLIGGTKFLVPGTPARFSGSLLGGKAALTLSGVQPEDEAEYYCTLWYSNRWVFGGGTKLTVLHHHHHH

SEQ ID NO: 3333 - protein, 507 aa, synthetic construct
  REGION 1..507: note = Description of Artificial Sequence: Synthetic polypeptide
EVQLVESGGGLVQPGRSLTLSCAASTNIFSITPGGWYRQAPGKQRELVAAIHGASTLYADSVKGRFTISRDNAKNSIYLQMNSLRPEDTALYYCNKVPWGDYHPGNVYWGQGTQVTVSSGGGGSGGGSEVQLVESGGGLVQPGNSLRLSCAASGFTFSKFGMSWVRQAPGKGLEWVSSISGSGRDTLYADSVKGRFTISRDNAKTTLYLQMNSLRPEDTAVYYCTIGGSLSVSSQGTLVTVSSGGGGSGGGSEVQLVESGGGLVQPGGSLKLSCAASGFTFNKYAINWVRQAPGKGLEWVARIRSKYNNYATYYADQVKDRFTISRDDSKNTAYLQMNNLKTEDTAVYYCVRHANFGNSYISYWAYWGQGTLVTVSSGGGGSGGGGSGGGGSQTVVTQEPSLTVSPGGTVTLTCASSTGAVTSGNYPNWVQQKPGQAPRGLIGGTKFLVPGTPARFSGSLLGGKAALTLSGVQPEDEAEYYCTLWYSNRWVFGGGTKLTVLHHHHHH

SEQ ID NO: 3334 - protein, 499 aa, synthetic construct
  REGION 1..499: note = Description of Artificial Sequence: Synthetic polypeptide
EVQLVESGGGLVQPGGSLTLSCAASRFMISEYSMHWVRQAPGKGLEWVSTINPAGTTDYAESVKGRFTISRDNAKNTLYLQMNSLKPEDTAVYYCDGYGYRGQGTQVTVSSGGGGSGGGSEVQLVESGGGLVQPGNSLRLSCAASGFTFSKFGMSWVRQAPGKGLEWVSSISGSGRDTLYADSVKGRFTISRDNAKTTLYLQMNSLRPEDTAVYYCTIGGSLSVSSQGTLVTVSSGGGGSGGGSEVQLVESGGGLVQPGGSLKLSCAASGFTFNKYAINWVRQAPGKGLEWVARIRSKYNNYATYYADQVKDRFTISRDDSKNTAYLQMNNLKTEDTAVYYCVRHANFGNSYISYWAYWGQGTLVTVSSGGGGSGGGGSGGGGSQTVVTQEPSLTVSPGGTVTLTCASSTGAVTSGNYPNWVQQKPGQAPRGLIGGTKFLVPGTPARFSGSLLGGKAALTLSGVQPEDEAEYYCTLWYSNRWVFGGGTKLTVLHHHHHH

SEQ ID NO: 3335 - protein, 499 aa, synthetic construct
  REGION 1..499: note = Description of Artificial Sequence: Synthetic polypeptide
EVQLVESGGGLVQPGGSLTLSCAASRFMISEYSMHWVRQAPGKGLEWVSTINPAGTTDYAESVKGRFTISRDNAKNTLYLQMNSLKPEDTAVYYCDGYGYRGQGTQVTVSSGGGGSGGGSEVQLVESGGGLVQPGNSLRLSCAASGFTFSKFGMSWVRQAPGKGLEWVSSISGSGRDTLYADSVKGRFTISRDNAKTTLYLQMNSLRPEDTAVYYCTIGGSLSVSSQGTLVTVSSGGGGSGGGSEVQLVESGGGLVQPGGSLKLSCAASGFTFNNYAMNWVRQAPGKGLEWVARIRSGYNNYATYYADSVKDRFTISRDDSKNTAYLQMNNLKTEDTAVYYCVRHGNFGNSYISYWAYWGQGTLVTVSSGGGGSGGGGSGGGGSQTVVTQEPSLTVSPGGTVTLTCGSYTGAVTSGNYPNWVQQKPGQAPRGLIGGTKFNAPGTPARFSGSLLGGKAALTLSGVQPEDEAEYYCVLWYANRWVFGGGTKLTVLHHHHHH

SEQ ID NO: 3336 - protein, 499 aa, synthetic construct
  REGION 1..499: note = Description of Artificial Sequence: Synthetic polypeptide
EVQLVESGGGLVQPGGSLTLSCAASRFMISEYSMHWVRQAPGKGLEWVSTINPAGTTDYAESVKGRFTISRDNAKNTLYLQMNSLKPEDTAVYYCDGYGYRGQGTQVTVSSGGGGSGGGSEVQLVESGGGLVQPGNSLRLSCAASGFTFSKFGMSWVRQAPGKGLEWVSSISGSGRDTLYADSVKGRFTISRDNAKTTLYLQMNSLRPEDTAVYYCTIGGSLSVSSQGTLVTVSSGGGGSGGGSEVQLVESGGGLVQPGGSLKLSCAASGFEFNKYAMNWVRQAPGKGLEWVARIRSKYNNYETYYADSVKDRFTISRDDSKNTAYLQMNNLKTEDTAVYYCVRHGNFGNSLISYWAYWGQGTLVTVSSGGGGSGGGGSGGGGSQTVVTQEPSLTVSPGGTVTLTCGSSSGAVTSGNYPNWVQQKPGQAPRGLIGGTKFGAPGTPARFSGSLLGGKAALTLSGVQPEDEAEYYCVLWYSNRWVFGGGTKLTVLHHHHHH

SEQ ID NO: 3337 - protein, 499 aa, synthetic construct
  REGION 1..499: note = Description of Artificial Sequence: Synthetic polypeptide
EVQLVESGGGLVQPGGSLTLSCAASRFMISEYSMHWVRQAPGKGLEWVSTINPAGTTDYAESVKGRFTISRDNAKNTLYLQMNSLKPEDTAVYYCDGYGYRGQGTQVTVSSGGGGSGGGSEVQLVESGGGLVQPGNSLRLSCAASGFTFSSFGMSWVRQAPGKGLEWVSSISGSGSDTLYADSVKGRFTISRDNAKTTLYLQMNSLRPEDTAVYYCTIGGSLSRSSQGTLVTVSSGGGGSGGGSEVQLVESGGGLVQPGGSLKLSCAASGFTFNKYAMNWVRQAPGKGLEWVARIRSKYNNYATYYADSVKDRFTISRDDSKNTAYLQMNNLKTEDTAVYYCVRHGNFGNSYISYWAYWGQGTLVTVSSGGGGSGGGGSGGGGSQTVVTQEPSLTVSPGGTVTLTCGSSTGAVTSGNYPNWVQQKPGQAPRGLIGGTKFLAPGTPARFSGSLLGGKAALTLSGVQPEDEAEYYCVLWYSNRWVFGGGTKLTVLHHHHHH

SEQ ID NO: 3338 - protein, 499 aa, synthetic construct
  REGION 1..499: note = Description of Artificial Sequence: Synthetic polypeptide
EVQLVESGGGLVQPGGSLRLSCAASRFMISEYSMHWVRQAPGKGLEWVSTINPAGTTDYAESVKGRFTISRDNAKNTLYLQMNSLRAEDTAVYYCDGYGYRGQGTLVTVSSGGGGSGGGSEVQLVESGGGLVQPGNSLRLSCAASGFTFSKFGMSWVRQAPGKGLEWVSSISGSGRDTLYADSVKGRFTISRDNAKTTLYLQMNSLRPEDTAVYYCTIGGSLSVSSQGTLVTVSSGGGGSGGGSEVQLVESGGGLVQPGGSLKLSCAASGFTFNKYAINWVRQAPGKGLEWVARIRSKYNNYATYYADQVKDRFTISRDDSKNTAYLQMNNLKTEDTAVYYCVRHANFGNSYISYWAYWGQGTLVTVSSGGGGSGGGGSGGGGSQTVVTQEPSLTVSPGGTVTLTCASSTGAVTSGNYPNWVQQKPGQAPRGLIGGTKFLVPGTPARFSGSLLGGKAALTLSGVQPEDEAEYYCTLWYSNRWVFGGGTKLTVLHHHHHH

SEQ ID NO: 3339 - protein, 499 aa, synthetic construct
  REGION 1..499: note = Description of Artificial Sequence: Synthetic polypeptide
EVQLVESGGGLVQPGGSLTLSCAASRFMISEYHMHWVRQAPGKGLEWVSDINPAGTTDYAESVKGRFTISRDNAKNTLYLQMNSLKPEDTAVYYCDSYGYRGQGTQVTVSSGGGGSGGGSEVQLVESGGGLVQPGNSLRLSCAASGFTFSKFGMSWVRQAPGKGLEWVSSISGSGRDTLYADSVKGRFTISRDNAKTTLYLQMNSLRPEDTAVYYCTIGGSLSVSSQGTLVTVSSGGGGSGGGSEVQLVESGGGLVQPGGSLKLSCAASGFTFNKYAINWVRQAPGKGLEWVARIRSKYNNYATYYADQVKDRFTISRDDSKNTAYLQMNNLKTEDTAVYYCVRHANFGNSYISYWAYWGQGTLVTVSSGGGGSGGGGSGGGGSQTVVTQEPSLTVSPGGTVTLTCASSTGAVTSGNYPNWVQQKPGQAPRGLIGGTKFLVPGTPARFSGSLLGGKAALTLSGVQPEDEAEYYCTLWYSNRWVFGGGTKLTVLHHHHHH

SEQ ID NO: 3340 - protein, 499 aa, synthetic construct
  REGION 1..499: note = Description of Artificial Sequence: Synthetic polypeptide
EVQLVESGGGLVQPGGSLTLSCAASRFMISEYHMHWVRQAPGKGLEWVSTINPAGTTDYAESVKGRFTISRDNAKNTLYLQMNSLKPEDTAVYYCDSYGYRGQGTQVTVSSGGGGSGGGSEVQLVESGGGLVQPGNSLRLSCAASGFTFSKFGMSWVRQAPGKGLEWVSSISGSGRDTLYADSVKGRFTISRDNAKTTLYLQMNSLRPEDTAVYYCTIGGSLSVSSQGTLVTVSSGGGGSGGGSEVQLVESGGGLVQPGGSLKLSCAASGFTFNKYAINWVRQAPGKGLEWVARIRSKYNNYATYYADQVKDRFTISRDDSKNTAYLQMNNLKTEDTAVYYCVRHANFGNSYISYWAYWGQGTLVTVSSGGGGSGGGGSGGGGSQTVVTQEPSLTVSPGGTVTLTCASSTGAVTSGNYPNWVQQKPGQAPRGLIGGTKFLVPGTPARFSGSLLGGKAALTLSGVQPEDEAEYYCTLWYSNRWVFGGGTKLTVLHHHHHH

SEQ ID NO: 3341 - protein, 504 aa, synthetic construct
  REGION 1..504: note = Description of Artificial Sequence: Synthetic polypeptide
QVQLVESGGGLVKPGESLRLSCAASGFTFSDYYMYWVRQAPGKGLEWVAIISDGGYYTYYSDIIKGRFTISRDNAKNSLYLQMNSLKAEDTAVYYCARGFPLLRHGAMDYWGQGTLVTVSSGGGGSGGGGSGGGGSDIQMTQSPSSLSASVGDRVTITCKASQNVDTNVAWYQQKPGQAPKSLIYSASYRYSDVPSRFSGSASGTDFTLTISSVQSEDFATYYCQQYDSYPYTFGGGTKLEIKSGGGGSEVQLVESGGGLVQPGGSLKLSCAASGFTFNKYAMNWVRQAPGKGLEWVARIRSKYNNYATYYADSVKDRFTISRDDSKNTAYLQMNNLKTEDTAVYYCVRHGNFGNSYISYWAYWGQGTLVTVSSGGGGSGGGGSGGGGSQTVVTQEPSLTVSPGGTVTLTCGSSTGAVTSGNYPNWVQQKPGQAPRGLIGGTKFLAPGTPARFSGSLLGGKAALTLSGVQPEDEAEYYCVLWYSNRWVFGGGTKLTVLHHHHHH

SEQ ID NO: 3342 - protein, 512 aa, synthetic construct
  REGION 1..512: note = Description of Artificial Sequence: Synthetic polypeptide
QVKLEESGGGSVQTGGSLRLTCAASGRTSRSYGMGWFRQAPGKEREFVSGISWRGDSTGYADSVKGRFTISRDNAKNTVDLQMNSLKPEDTAIYYCAAAAGSAWYGTLYEYDYWGQGTQVTVSSGGGGSGGGSEVQLVESGGGLVQPGNSLRLSCAASGFTFSSFGMSWVRQAPGKGLEWVSSISGSGSDTLYADSVKGRFTISRDNAKTTLYLQMNSLRPEDTAVYYCTIGGSLSRSSQGTLVTVSSGGGGSGGGSEVQLVESGGGLVQPGGSLKLSCAASGFTFNKYAMNWVRQAPGKGLEWVARIRSKYNNYATYYADSVKDRFTISRDDSKNTAYLQMNNLKTEDTAVYYCVRHGNFGNSYISYWAYWGQGTLVTVSSGGGGSGGGGSGGGGSQTVVTQEPSLTVSPGGTVTLTCGSSTGAVTSGNYPNWVQQKPGQAPRGLIGGTKFLAPGTPARFSGSLLGGKAALTLSGVQPEDEAEYYCVLWYSNRWVFGGGTKLTVLHHHHHH

SEQ ID NO: 3343 - protein, 508 aa, synthetic construct
  REGION 1..508: note = Description of Artificial Sequence: Synthetic polypeptide
QVQLVESGGGVVQAGRSLTLSCAYSGVTVNVYRMGWFRQAPGKEREFVANINWSGNNRDYADSVRGRFTISRDNSKNTLYLQMNSLRAEDTAVYYCASEKPGRLGEYDYGSQGTLVTVSSGGGGSGGGSEVQLVESGGGLVQPGNSLRLSCAASGFTFSKFGMSWVRQAPGKGLEWVSSISGSGRDTLYADSVKGRFTISRDNAKTTLYLQMNSLRPEDTAVYYCTIGGSLSVSSQGTLVTVSSGGGGSGGGSEVQLVESGGGLVQPGGSLKLSCAASGFTFNKYAINWVRQAPGKGLEWVARIRSKYNNYATYYADQVKDRFTISRDDSKNTAYLQMNNLKTEDTAVYYCVRHANFGNSYISYWAYWGQGTLVTVSSGGGGSGGGGSGGGGSQTVVTQEPSLTVSPGGTVTLTCASSTGAVTSGNYPNWVQQKPGQAPRGLIGGTKFLVPGTPARFSGSLLGGKAALTLSGVQPEDEAEYYCTLWYSNRWVFGGGTKLTVLHHHHHH

SEQ ID NO: 3344 - protein, 508 aa, synthetic construct
  REGION 1..508: note = Description of Artificial Sequence: Synthetic polypeptide
QVQLVESGGGVVQAGRSLRLSCAYSGVTVNVYRMGWFRQAPGKEREFVANINWSGNNRDYADSVRGRFTISRDNSKNTLYLQMNSLRAEDTAVYYCASEKPGRLGEYDYGSQGTLVTVSSGGGGSGGGSEVQLVESGGGLVQPGNSLRLSCAASGFTFSKFGMSWVRQAPGKGLEWVSSISGSGRDTLYADSVKGRFTISRDNAKTTLYLQMNSLRPEDTAVYYCTIGGSLSVSSQGTLVTVSSGGGGSGGGSEVQLVESGGGLVQPGGSLKLSCAASGFTFNKYAINWVRQAPGKGLEWVARIRSKYNNYATYYADQVKDRFTISRDDSKNTAYLQMNNLKTEDTAVYYCVRHANFGNSYISYWAYWGQGTLVTVSSGGGGSGGGGSGGGGSQTVVTQEPSLTVSPGGTVTLTCASSTGAVTSGNYPNWVQQKPGQAPRGLIGGTKFLVPGTPARFSGSLLGGKAALTLSGVQPEDEAEYYCTLWYSNRWVFGGGTKLTVLHHHHHH

SEQ ID NO: 3345 - protein, 499 aa, synthetic construct
  REGION 1..499: note = Description of Artificial Sequence: Synthetic polypeptide
EVQLVESGGGLVQPGGSLTLSCAASRFMISEYHMHWVRQAPGKGLEWVSTINPAGTTDYAESVKGRFTISRDNAKNTLYLQMNSLRAEDTAVYYCDSYGYRGQGTLVTVSSGGGGSGGGSEVQLVESGGGLVQPGNSLRLSCAASGFTFSKFGMSWVRQAPGKGLEWVSSISGSGRDTLYADSVKGRFTISRDNAKTTLYLQMNSLRPEDTAVYYCTIGGSLSVSSQGTLVTVSSGGGGSGGGSEVQLVESGGGLVQPGGSLKLSCAASGFTFNKYAINWVRQAPGKGLEWVARIRSKYNNYATYYADQVKDRFTISRDDSKNTAYLQMNNLKTEDTAVYYCVRHANFGNSYISYWAYWGQGTLVTVSSGGGGSGGGGSGGGGSQTVVTQEPSLTVSPGGTVTLTCASSTGAVTSGNYPNWVQQKPGQAPRGLIGGTKFLVPGTPARFSGSLLGGKAALTLSGVQPEDEAEYYCTLWYSNRWVFGGGTKLTVLHHHHHH

SEQ ID NO: 3346 - protein, 511 aa, synthetic construct
  REGION 1..511: note = Description of Artificial Sequence: Synthetic polypeptide
QVQLVESGGGLVQAGGSLRLSCVASGSTSNINNMRWYRQAPGKERELVAVITRGGYAIYLDAVKGRFTISRDNANNAIYLEMNSLKPEDTAVYVCNADRVEGTSGGPQLRDYFGQGTQVTVSSGGGGSGGGSEVQLVESGGGLVQPGNSLRLSCAASGFTFSSFGMSWVRQAPGKGLEWVSSISGSGSDTLYADSVKGRFTISRDNAKTTLYLQMNSLRPEDTAVYYCTIGGSLSRSSQGTLVTVSSGGGGSGGGSEVQLVESGGGLVQPGGSLKLSCAASGFTFNKYAMNWVRQAPGKGLEWVARIRSKYNNYATYYADSVKDRFTISRDDSKNTAYLQMNNLKTEDTAVYYCVRHGNFGNSYISYWAYWGQGTLVTVSSGGGGSGGGGSGGGGSQTVVTQEPSLTVSPGGTVTLTCGSSTGAVTSGNYPNWVQQKPGQAPRGLIGGTKFLAPGTPARFSGSLLGGKAALTLSGVQPEDEAEYYCVLWYSNRWVFGGGTKLTVLHHHHHH

SEQ ID NO: 3347 - protein, 504 aa, synthetic construct
  REGION 1..504: note = Description of Artificial Sequence: Synthetic polypeptide
QVQLVESGGGLVQAGGSLRLSCAASGSTFGINAMGWYRQAPGKQRELVAVISRGGSTNYADSVKGRFTISRDNAENTVSLQMNTLKPEDTAVYFCNARTYTRHDYWGQGTQVTVSSGGGGSGGGSEVQLVESGGGLVQPGNSLRLSCAASGFTFSSFGMSWVRQAPGKGLEWVSSISGSGSDTLYADSVKGRFTISRDNAKTTLYLQMNSLRPEDTAVYYCTIGGSLSRSSQGTLVTVSSGGGGSGGGSEVQLVESGGGLVQPGGSLKLSCAASGFTFNKYAMNWVRQAPGKGLEWVARIRSKYNNYATYYADSVKDRFTISRDDSKNTAYLQMNNLKTEDTAVYYCVRHGNFGNSYISYWAYWGQGTLVTVSSGGGGSGGGGSGGGGSQTVVTQEPSLTVSPGGTVTLTCGSSTGAVTSGNYPNWVQQKPGQAPRGLIGGTKFLAPGTPARFSGSLLGGKAALTLSGVQPEDEAEYYCVLWYSNRWVFGGGTKLTVLHHHHHH

SEQ ID NO: 3348 - protein, 510 aa, synthetic construct
  REGION 1..510: note = Description of Artificial Sequence: Synthetic polypeptide
QVRLVESGGGLVQAGGSLRLSCAASISAFRLMSVRWYRQDPSKQREWVATIDQLGRTNYADSVKGRFAISKDSTRNTVYLQMNMLRPEDTAVYYCNAGGGPLGSRWLRGRHWGQGTQVTVSSGGGGSGGGSEVQLVESGGGLVQPGNSLRLSCAASGFTFSSFGMSWVRQAPGKGLEWVSSISGSGSDTLYADSVKGRFTISRDNAKTTLYLQMNSLRPEDTAVYYCTIGGSLSRSSQGTLVTVSSGGGGSGGGSEVQLVESGGGLVQPGGSLKLSCAASGFTFNKYAMNWVRQAPGKGLEWVARIRSKYNNYATYYADSVKDRFTISRDDSKNTAYLQMNNLKTEDTAVYYCVRHGNFGNSYISYWAYWGQGTLVTVSSGGGGSGGGGSGGGGSQTVVTQEPSLTVSPGGTVTLTCGSSTGAVTSGNYPNWVQQKPGQAPRGLIGGTKFLAPGTPARFSGSLLGGKAALTLSGVQPEDEAEYYCVLWYSNRWVFGGGTKLTVLHHHHHH

SEQ ID NO: 3349 - protein, 507 aa, synthetic construct
  REGION 1..507: note = Description of Artificial Sequence: Synthetic polypeptide
QVRLVESGGGLVQAGESLRLSCAASGRPFSINTMGWYRQAPGKQRELVASISSSGDFTYTDSVKGRFTISRDNAKNTVYLQMNSLKPEDTAVYYCNARRTYLPRRFGSWGQGTQVTVSSGGGGSGGGSEVQLVESGGGLVQPGNSLRLSCAASGFTFSSFGMSWVRQAPGKGLEWVSSISGSGSDTLYADSVKGRFTISRDNAKTTLYLQMNSLRPEDTAVYYCTIGGSLSRSSQGTLVTVSSGGGGSGGGSEVQLVESGGGLVQPGGSLKLSCAASGFTFNKYAMNWVRQAPGKGLEWVARIRSKYNNYATYYADSVKDRFTISRDDSKNTAYLQMNNLKTEDTAVYYCVRHGNFGNSYISYWAYWGQGTLVTVSSGGGGSGGGGSGGGGSQTVVTQEPSLTVSPGGTVTLTCGSSTGAVTSGNYPNWVQQKPGQAPRGLIGGTKFLAPGTPARFSGSLLGGKAALTLSGVQPEDEAEYYCVLWYSNRWVFGGGTKLTVLHHHHHH

SEQ ID NO: 3350 - protein, 507 aa, synthetic construct; identical to SEQ ID NO: 3349
  REGION 1..507: note = Description of Artificial Sequence: Synthetic polypeptide

SEQ ID NO: 3351 - protein, 505 aa, synthetic construct
  REGION 1..505: note = Description of Artificial Sequence: Synthetic polypeptide
QVQPVESGGGLVQPGGSLRLSCVVSGSDFTEDAMAWYRQASGKERESVAFVSKDGKRILYLDSVRGRFTISRDIDKKTVYLQMDNLKPEDTGVYYCNSAPGAARNYWGQGTQVTVSSGGGGSGGGSEVQLVESGGGLVQPGNSLRLSCAASGFTFSSFGMSWVRQAPGKGLEWVSSISGSGSDTLYADSVKGRFTISRDNAKTTLYLQMNSLRPEDTAVYYCTIGGSLSRSSQGTLVTVSSGGGGSGGGSEVQLVESGGGLVQPGGSLKLSCAASGFTFNKYAMNWVRQAPGKGLEWVARIRSKYNNYATYYADSVKDRFTISRDDSKNTAYLQMNNLKTEDTAVYYCVRHGNFGNSYISYWAYWGQGTLVTVSSGGGGSGGGGSGGGGSQTVVTQEPSLTVSPGGTVTLTCGSSTGAVTSGNYPNWVQQKPGQAPRGLIGGTKFLAPGTPARFSGSLLGGKAALTLSGVQPEDEAEYYCVLWYSNRWVFGGGTKLTVLHHHHHH

SEQ ID NO: 3352 - protein, 505 aa, synthetic construct
  REGION 1..505: note = Description of Artificial Sequence: Synthetic polypeptide
QVQPVESGGGLVQPGGSLRLSCVVSGSDFTEDAMAWYRQASGKERESVAFVSKDGKRILYLDSVRGRFTISRDIYKKTVYLQMDNLKPEDTGVYYCNSAPGAARNVWGQGTQVTVSSGGGGSGGGSEVQLVESGGGLVQPGNSLRLSCAASGFTFSSFGMSWVRQAPGKGLEWVSSISGSGSDTLYADSVKGRFTISRDNAKTTLYLQMNSLRPEDTAVYYCTIGGSLSRSSQGTLVTVSSGGGGSGGGSEVQLVESGGGLVQPGGSLKLSCAASGFTFNKYAMNWVRQAPGKGLEWVARIRSKYNNYATYYADSVKDRFTISRDDSKNTAYLQMNNLKTEDTAVYYCVRHGNFGNSYISYWAYWGQGTLVTVSSGGGGSGGGGSGGGGSQTVVTQEPSLTVSPGGTVTLTCGSSTGAVTSGNYPNWVQQKPGQAPRGLIGGTKFLAPGTPARFSGSLLGGKAALTLSGVQPEDEAEYYCVLWYSNRWVFGGGTKLTVLHHHHHH

SEQ ID NO: 3353 - protein, 503 aa, synthetic construct
  REGION 1..503: note = Description of Artificial Sequence: Synthetic polypeptide
EVQLVESGGGLVQPGNSLRLSCAASGFTFSSFGMSWVRQAPGKGLEWVSSISGSGSDTLYADSVKGRFTISRDNAKTTLYLQMNSLRPEDTAVYYCTIGGSLSRSSQGTLVTVSSGGGGSGGGSEVQLVESGGGLVQPGNSLRLSCAASGFTFSSFGMSWVRQAPGKGLEWVSSISGSGSDTLYADSVKGRFTISRDNAKTTLYLQMNSLRPEDTAVYYCTIGGSLSRSSQGTLVTVSSGGGGSGGGSEVQLVESGGGLVQPGGSLKLSCAASGFTFNKYAMNWVRQAPGKGLEWVARIRSKYNNYATYYADSVKDRFTISRDDSKNTAYLQMNNLKTEDTAVYYCVRHGNFGNSYISYWAYWGQGTLVTVSSGGGGSGGGGSGGGGSQTVVTQEPSLTVSPGGTVTLTCGSSTGAVTSGNYPNWVQQKPGQAPRGLIGGTKFLAPGTPARFSGSLLGGKAALTLSGVQPEDEAEYYCVLWYSNRWVFGGGTKLTVLHHHHHH

SEQ ID NO: 3354 - protein, 503 aa, synthetic construct; identical to SEQ ID NO: 3353
  REGION 1..503: note = Description of Artificial Sequence: Synthetic polypeptide

SEQ ID NO: 3355 - protein, 512 aa, synthetic construct
  REGION 1..512: note = Description of Artificial Sequence: Synthetic polypeptide
QVQIVESGGGLVQAGGSLRLSCVASGLTYSIVAVGWYRQAPGKEREMVADISPVGNTNYADSVKGRFTISKENAKNTVYLQMNSLKPEDTAVYYCHIVRGWLDERPGPGPIVYWGQGTQVTVSSGGGGSGGGSEVQLVESGGGLVQPGNSLRLSCAASGFTFSSFGMSWVRQAPGKGLEWVSSISGSGSDTLYADSVKGRFTISRDNAKTTLYLQMNSLRPEDTAVYYCTIGGSLSRSSQGTLVTVSSGGGGSGGGSEVQLVESGGGLVQPGGSLKLSCAASGFTFNKYAMNWVRQAPGKGLEWVARIRSKYNNYATYYADSVKDRFTISRDDSKNTAYLQMNNLKTEDTAVYYCVRHGNFGNSYISYWAYWGQGTLVTVSSGGGGSGGGGSGGGGSQTVVTQEPSLTVSPGGTVTLTCGSSTGAVTSGNYPNWVQQKPGQAPRGLIGGTKFLAPGTPARFSGSLLGGKAALTLSGVQPEDEAEYYCVLWYSNRWVFGGGTKLTVLHHHHHH

SEQ ID NO: 3356 - protein, 503 aa, synthetic construct
  REGION 1..503: note = Description of Artificial Sequence: Synthetic polypeptide
QVQLVESGGGLVQTGGSLRLSCAASGLTFGVYGMEWFRQAPGKQREWVASHTSTGYVYYRDSVKGRFTISRDNAKSTVYLQMNSLKPEDTAIYYCKANRGSYEYWGQGTQVTVSSGGGGSGGGSEVQLVESGGGLVQPGNSLRLSCAASGFTFSSFGMSWVRQAPGKGLEWVSSISGSGSDTLYADSVKGRFTISRDNAKTTLYLQMNSLRPEDTAVYYCTIGGSLSRSSQGTLVTVSSGGGGSGGGSEVQLVESGGGLVQPGGSLKLSCAASGFTFNKYAMNWVRQAPGKGLEWVARIRSKYNNYATYYADSVKDRFTISRDDSKNTAYLQMNNLKTEDTAVYYCVRHGNFGNSYISYWAYWGQGTLVTVSSGGGGSGGGGSGGGGSQTVVTQEPSLTVSPGGTVTLTCGSSTGAVTSGNYPNWVQQKPGQAPRGLIGGTKFLAPGTPARFSGSLLGGKAALTLSGVQPEDEAEYYCVLWYSNRWVFGGGTKLTVLHHHHHH

SEQ ID NO: 3357 - protein, 502 aa, synthetic construct
  REGION 1..502: note = Description of Artificial Sequence: Synthetic polypeptide
QVQLVESGGGLVQAGGSLRLSCAASTTSSINSMSWYRQAQGKQREPVAVITDRGSTSYADSVKGRFTISRDNAKNTVYLQMNSLKPEDTAIYTCHVIADWRGYWGQGTQVTVSSGGGGSGGGSEVQLVESGGGLVQPGNSLRLSCAASGFTFSSFGMSWVRQAPGKGLEWVSSISGSGSDTLYADSVKGRFTISRDNAKTTLYLQMNSLRPEDTAVYYCTIGGSLSRSSQGTLVTVSSGGGGSGGGSEVQLVESGGGLVQPGGSLKLSCAASGFTFNKYAMNWVRQAPGKGLEWVARIRSKYNNYATYYADSVKDRFTISRDDSKNTAYLQMNNLKTEDTAVYYCVRHGNFGNSYISYWAYWGQGTLVTVSSGGGGSGGGGSGGGGSQTVVTQEPSLTVSPGGTVTLTCGSSTGAVTSGNYPNWVQQKPGQAPRGLIGGTKFLAPGTPARFSGSLLGGKAALTLSGVQPEDEAEYYCVLWYSNRWVFGGGTKLTVLHHHHHH

SEQ ID NO: 3358 - protein, 508 aa, synthetic construct
  REGION 1..508: note = Description of Artificial Sequence: Synthetic polypeptide
QVQLVESGGGLVQAGGSLRLSCAASGRTLSRYAMGWFRQAPGKERQFVAAISRSGGTTRYSDSVKGRFTISRDNAANTFYLQMNNLRPDDTAVYYCNVRRRGWGRTLEYWGQGTQVTVSSGGGGSGGGSEVQLVESGGGLVQPGNSLRLSCAASGFTFSSFGMSWVRQAPGKGLEWVSSISGSGSDTLYADSVKGRFTISRDNAKTTLYLQMNSLRPEDTAVYYCTIGGSLSRSSQGTLVTVSSGGGGSGGGSEVQLVESGGGLVQPGGSLKLSCAASGFTFNKYAMNWVRQAPGKGLEWVARIRSKYNNYATYYADSVKDRFTISRDDSKNTAYLQMNNLKTEDTAVYYCVRHGNFGNSYISYWAYWGQGTLVTVSSGGGGSGGGGSGGGGSQTVVTQEPSLTVSPGGTVTLTCGSSTGAVTSGNYPNWVQQKPGQAPRGLIGGTKFLAPGTPARFSGSLLGGKAALTLSGVQPEDEAEYYCVLWYSNRWVFGGGTKLTVLHHHHHH

SEQ ID NO: 3359 - protein, 505 aa, synthetic construct
  REGION 1..505: note = Description of Artificial Sequence: Synthetic polypeptide
QVQLGESGGGLVQAGGSLRLSCAASGSIFSPNAMIWHRQAPGKQREPVASINSSGSTNYGDSVKGRFTVSRDIVKNTMYLQMNSLKPEDTAVYYCSYSDFRRGTQYWGQGTQVTVSSGGGGSGGGSEVQLVESGGGLVQPGNSLRLSCAASGFTFSSFGMSWVRQAPGKGLEWVSSISGSGSDTLYADSVKGRFTISRDNAKTTLYLQMNSLRPEDTAVYYCTIGGSLSRSSQGTLVTVSSGGGGSGGGSEVQLVESGGGLVQPGGSLKLSCAASGFTFNKYAMNWVRQAPGKGLEWVARIRSKYNNYATYYADSVKDRFTISRDDSKNTAYLQMNNLKTEDTAVYYCVRHGNFGNSYISYWAYWGQGTLVTVSSGGGGSGGGGSGGGGSQTVVTQEPSLTVSPGGTVTLTCGSSTGAVTSGNYPNWVQQKPGQAPRGLIGGTKFLAPGTPARFSGSLLGGKAALTLSGVQPEDEAEYYCVLWYSNRWVFGGGTKLTVLHHHHHH

SEQ ID NO: 3360 - protein, 505 aa, synthetic construct; identical to SEQ ID NO: 3359
  REGION 1..505: note = Description of Artificial Sequence: Synthetic polypeptide

SEQ ID NO: 3361 - protein, 507 aa, synthetic construct
  REGION 1..507: note = Description of Artificial Sequence: Synthetic polypeptide
QVQLVESGGGLVPSGGSLRLSCAASGATSAITNLGWYRRAPGQVREMVARISVREDKEDYEDSVKGRFTISRDNTQNLVYLQMNNLQPHDTAIYYCGAQRWGRGPGTTWGQGTQVTVSSGGGGSGGGSEVQLVESGGGLVQPGNSLRLSCAASGFTFSSFGMSWVRQAPGKGLEWVSSISGSGSDTLYADSVKGRFTISRDNAKTTLYLQMNSLRPEDTAVYYCTIGGSLSRSSQGTLVTVSSGGGGSGGGSEVQLVESGGGLVQPGGSLKLSCAASGFTFNKYAMNWVRQAPGKGLEWVARIRSKYNNYATYYADSVKDRFTISRDDSKNTAYLQMNNLKTEDTAVYYCVRHGNFGNSYISYWAYWGQGTLVTVSSGGGGSGGGGSGGGGSQTVVTQEPSLTVSPGGTVTLTCGSSTGAVTSGNYPNWVQQKPGQAPRGLIGGTKFLAPGTPARFSGSLLGGKAALTLSGVQPEDEAEYYCVLWYSNRWVFGGGTKLTVLHHHHHH

SEQ ID NO: 3362 - protein, 504 aa, synthetic construct
  REGION 1..504: note = Description of Artificial Sequence: Synthetic polypeptide
QVQLVESGGGLVQAGGSLRLSCAASGSTFRIRVMRWYRQAPGTERDLVAVISGSSTYYADSVKGRFTISRDNAKNTLYLQMNNLKPEDTAVYYCNADDSGIARDYWGQGTQVTVSSGGGGSGGGSEVQLVESGGGLVQPGNSLRLSCAASGFTFSSFGMSWVRQAPGKGLEWVSSISGSGSDTLYADSVKGRFTISRDNAKTTLYLQMNSLRPEDTAVYYCTIGGSLSRSSQGTLVTVSSGGGGSGGGSEVQLVESGGGLVQPGGSLKLSCAASGFTFNKYAMNWVRQAPGKGLEWVARIRSKYNNYATYYADSVKDRFTISRDDSKNTAYLQMNNLKTEDTAVYYCVRHGNFGNSYISYWAYWGQGTLVTVSSGGGGSGGGGSGGGGSQTVVTQEPSLTVSPGGTVTLTCGSSTGAVTSGNYPNWVQQKPGQAPRGLIGGTKFLAPGTPARFSGSLLGGKAALTLSGVQPEDEAEYYCVLWYSNRWVFGGGTKLTVLHHHHHH

SEQ ID NO: 3363 - protein, 506 aa, synthetic construct
  REGION 1..506: note = Description of Artificial Sequence: Synthetic polypeptide
QVQLVESGGGLVQAGESRRLSCAVSGDTSKFKAVGWYRQAPGAQRELLAWINNSGVGNTAESVKGRFTISRDNAKNTVYLQMNRLTPEDTDVYYCRFYRRFGINKNYWGQGTQVTVSSGGGGSGGGSEVQLVESGGGLVQPGNSLRLSCAASGFTFSSFGMSWVRQAPGKGLEWVSSISGSGSDTLYADSVKGRFTISRDNAKTTLYLQMNSLRPEDTAVYYCTIGGSLSRSSQGTLVTVSSGGGGSGGGSEVQLVESGGGLVQPGGSLKLSCAASGFTFNKYAMNWVRQAPGKGLEWVARIRSKYNNYATYYADSVKDRFTISRDDSKNTAYLQMNNLKTEDTAVYYCVRHGNFGNSYISYWAYWGQGTLVTVSSGGGGSGGGGSGGGGSQTVVTQEPSLTVSPGGTVTLTCGSSTGAVTSGNYPNWVQQKPGQAPRGLIGGTKFLAPGTPARFSGSLLGGKAALTLSGVQPEDEAEYYCVLWYSNRWVFGGGTKLTVLHHHHHH

SEQ ID NO: 3364 - protein, 510 aa, synthetic construct
  REGION 1..510: note = Description of Artificial Sequence: Synthetic polypeptide
QVQLVESGGGLVQAGGSLRLSCAASGSTFGNKPMGWYRQAPGKQRELVAVISSDGGSTRYAALVKGRFTISRDNAKNTVYLQMESLVAEDTAVYYCNALRTYYLNDPVVFSWGQGTQVTVSSGGGGSGGGSEVQLVESGGGLVQPGNSLRLSCAASGFTFSSFGMSWVRQAPGKGLEWVSSISGSGSDTLYADSVKGRFTISRDNAKTTLYLQMNSLRPEDTAVYYCTIGGSLSRSSQGTLVTVSSGGGGSGGGSEVQLVESGGGLVQPGGSLKLSCAASGFTFNKYAMNWVRQAPGKGLEWVARIRSKYNNYATYYADSVKDRFTISRDDSKNTAYLQMNNLKTEDTAVYYCVRHGNFGNSYISYWAYWGQGTLVTVSSGGGGSGGGGSGGGGSQTVVTQEPSLTVSPGGTVTLTCGSSTGAVTSGNYPNWVQQKPGQAPRGLIGGTKFLAPGTPARFSGSLLGGKAALTLSGVQPEDEAEYYCVLWYSNRWVFGGGTKLTVLHHHHHH

SEQ ID NO: 3365 - protein, 507 aa, synthetic construct
  REGION 1..507: note = Description of Artificial Sequence: Synthetic polypeptide
QVQLVESGGGLVQAGGSLRLSCAASGSTSSINTMYWYRQAPGKERELVAFISSGGSTNVRDSVKGRFSVSRDSAKNIVYLQMNSLTPEDTAVYYCNTYIPLRGTLHDYWGQGTQVTVSSGGGGSGGGSEVQLVESGGGLVQPGNSLRLSCAASGFTFSSFGMSWVRQAPGKGLEWVSSISGSGSDTLYADSVKGRFTISRDNAKTTLYLQMNSLRPEDTAVYYCTIGGSLSRSSQGTLVTVSSGGGGSGGGSEVQLVESGGGLVQPGGSLKLSCAASGFTFNKYAMNWVRQAPGKGLEWVARIRSKYNNYATYYADSVKDRFTISRDDSKNTAYLQMNNLKTEDTAVYYCVRHGNFGNSYISYWAYWGQGTLVTVSSGGGGSGGGGSGGGGSQTVVTQEPSLTVSPGGTVTLTCGSSTGAVTSGNYPNWVQQKPGQAPRGLIGGTKFLAPGTPARFSGSLLGGKAALTLSGVQPEDEAEYYCVLWYSNRWVFGGGTKLTVLHHHHHH

SEQ ID NO: 3366 - protein, 503 aa, synthetic construct
  REGION 1..503: note = Description of Artificial Sequence: Synthetic polypeptide
QVQLVESGGGLVQAGGSLRLSCVASGRTDRITTMGWYRQAPGKQRELVATISNRGTSNYANSVKGRFTISRDNAKNTVYLQMNSLKPEDTAVYYCNARKWGRNYWGQGTQVTVSSGGGGSGGGSEVQLVESGGGLVQPGNSLRLSCAASGFTFSSFGMSWVRQAPGKGLEWVSSISGSGSDTLYADSVKGRFTISRDNAKTTLYLQMNSLRPEDTAVYYCTIGGSLSRSSQGTLVTVSSGGGGSGGGSEVQLVESGGGLVQPGGSLKLSCAASGFTFNKYAMNWVRQAPGKGLEWVARIRSKYNNYATYYADSVKDRFTISRDDSKNTAYLQMNNLKTEDTAVYYCVRHGNFGNSYISYWAYWGQGTLVTVSSGGGGSGGGGSGGGGSQTVVTQEPSLTVSPGGTVTLTCGSSTGAVTSGNYPNWVQQKPGQAPRGLIGGTKFLAPGTPARFSGSLLGGKAALTLSGVQPEDEAEYYCVLWYSNRWVFGGGTKLTVLHHHHHH

SEQ ID NO: 3367 - protein, 507 aa, synthetic construct
  REGION 1..507: note = Description of Artificial Sequence: Synthetic polypeptide
QVQLVESGGGLVQARGSLRLSCTASGRTIGINDMAWYRQAPGNQRELVATITKGGTTDYADSVDGRFTISRDNAKNTVYLQMNSLKPEDTAVYYCNTKRREWAKDFEYWGQGTQVTVSSGGGGSGGGSEVQLVESGGGLVQPGNSLRLSCAASGFTFSSFGMSWVRQAPGKGLEWVSSISGSGSDTLYADSVKGRFTISRDNAKTTLYLQMNSLRPEDTAVYYCTIGGSLSRSSQGTLVTVSSGGGGSGGGSEVQLVESGGGLVQPGGSLKLSCAASGFTFNKYAMNWVRQAPGKGLEWVARIRSKYNNYATYYADSVKDRFTISRDDSKNTAYLQMNNLKTEDTAVYYCVRHGNFGNSYISYWAYWGQGTLVTVSSGGGGSGGGGSGGGGSQTVVTQEPSLTVSPGGTVTLTCGSSTGAVTSGNYPNWVQQKPGQAPRGLIGGTKFLAPGTPARFSGSLLGGKAALTLSGVQPEDEAEYYCVLWYSNRWVFGGGTKLTVLHHHHHH

SEQ ID NO: 3368 - protein, 502 aa, synthetic construct
  REGION 1..502: note = Description of Artificial Sequence: Synthetic polypeptide
QVQLVESGGGLVQAGGSLRLSCAASAIGSINSMSWYRQAPGKQREPVAVITDRGSTSYADSVKGRFTISRDNAKNTVYLQMNSLKPEDTAIYTCHVIADWRGYWGQGTQVTVSSGGGGSGGGSEVQLVESGGGLVQPGNSLRLSCAASGFTFSSFGMSWVRQAPGKGLEWVSSISGSGSDTLYADSVKGRFTISRDNAKTTLYLQMNSLRPEDTAVYYCTIGGSLSRSSQGTLVTVSSGGGGSGGGSEVQLVESGGGLVQPGGSLKLSCAASGFTFNKYAMNWVRQAPGKGLEWVARIRSKYNNYATYYADSVKDRFTISRDDSKNTAYLQMNNLKTEDTAVYYCVRHGNFGNSYISYWAYWGQGTLVTVSSGGGGSGGGGSGGGGSQTVVTQEPSLTVSPGGTVTLTCGSSTGAVTSGNYPNWVQQKPGQAPRGLIGGTKFLAPGTPARFSGSLLGGKAALTLSGVQPEDEAEYYCVLWYSNRWVFGGGTKLTVLHHHHHH

SEQ ID NO: 3369 - protein, 507 aa, synthetic construct
  REGION 1..507: note = Description of Artificial Sequence: Synthetic polypeptide
QVQLVESGGGLVQAGGSLRLSCAASGSTSSINTMYWFRQAPGEERELVATINRGGSTNVRDSVKGRFSVSRDSAKNIVYLQMNRLKPEDTAVYYCNTYIPYGGTLHDFWGQGTQVTVSSGGGGSGGGSEVQLVESGGGLVQPGNSLRLSCAASGFTFSSFGMSWVRQAPGKGLEWVSSISGSGSDTLYADSVKGRFTISRDNAKTTLYLQMNSLRPEDTAVYYCTIGGSLSRSSQGTLVTVSSGGGGSGGGSEVQLVESGGGLVQPGGSLKLSCAASGFTFNKYAMNWVRQAPGKGLEWVARIRSKYNNYATYYADSVKDRFTISRDDSKNTAYLQMNNLKTEDTAVYYCVRHGNFGNSYISYWAYWGQGTLVTVSSGGGGSGGGGSGGGGSQTVVTQEPSLTVSPGGTVTLTCGSSTGAVTSGNYPNWVQQKPGQAPRGLIGGTKFLAPGTPARFSGSLLGGKAALTLSGVQPEDEAEYYCVLWYSNRWVFGGGTKLTVLHHHHHH

SEQ ID NO: 3370 - protein, 507 aa, synthetic construct; identical to SEQ ID NO: 3369
  REGION 1..507: note = Description of Artificial Sequence: Synthetic polypeptide

SEQ ID NO: 3371 - protein, 502 aa, synthetic construct
  REGION 1..502: note = Description of Artificial Sequence: Synthetic polypeptide
QVQLVESGGGLVQAGGSLRLSCTTSTTFSINSMSWYRQAPGNQREPVAVITNRGTTSYADSVKGRFTISRDNARNTVYLQMDSLKPEDTAIYTCHVIADWRGYWGQGTQVTVSSGGGGSGGGSEVQLVESGGGLVQPGNSLRLSCAASGFTFSSFGMSWVRQAPGKGLEWVSSISGSGSDTLYADSVKGRFTISRDNAKTTLYLQMNSLRPEDTAVYYCTIGGSLSRSSQGTLVTVSSGGGGSGGGSEVQLVESGGGLVQPGGSLKLSCAASGFTFNKYAMNWVRQAPGKGLEWVARIRSKYNNYATYYADSVKDRFTISRDDSKNTAYLQMNNLKTEDTAVYYCVRHGNFGNSYISYWAYWGQGTLVTVSSGGGGSGGGGSGGGGSQTVVTQEPSLTVSPGGTVTLTCGSSTGAVTSGNYPNWVQQKPGQAPRGLIGGTKFLAPGTPARFSGSLLGGKAALTLSGVQPEDEAEYYCVLWYSNRWVFGGGTKLTVLHHHHHH

SEQ ID NO: 3372 - protein, 504 aa, synthetic construct
  REGION 1..504: note = Description of Artificial Sequence: Synthetic polypeptide
QVQLVESGGGLVQAGGSLTLSCAASGSTFSIRAMRWYRQAPGTERDLVAVIYGSSTYYADAVKGRFTISRDNAKNTLYLQMNNLKPEDTAVYYCNADTIGTARDYWGQGTQVTVSSGGGGSGGGSEVQLVESGGGLVQPGNSLRLSCAASGFTFSSFGMSWVRQAPGKGLEWVSSISGSGSDTLYADSVKGRFTISRDNAKTTLYLQMNSLRPEDTAVYYCTIGGSLSRSSQGTLVTVSSGGGGSGGGSEVQLVESGGGLVQPGGSLKLSCAASGFTFNKYAMNWVRQAPGKGLEWVARIRSKYNNYATYYADSVKDRFTISRDDSKNTAYLQMNNLKTEDTAVYYCVRHGNFGNSYISYWAYWGQGTLVTVSSGGGGSGGGGSGGGGSQTVVTQEPSLTVSPGGTVTLTCGSSTGAVTSGNYPNWVQQKPGQAPRGLIGGTKFLAPGTPARFSGSLLGGKAALTLSGVQPEDEAEYYCVLWYSNRWVFGGGTKLTVLHHHHHH

SEQ ID NO: 3373 - protein, 505 aa, synthetic construct
  REGION 1..505: note = Description of Artificial Sequence: Synthetic polypeptide
QVQLVESGGGLVQAGGSLRLSCVASGRTSTIDTMYWHRQAPGNERELVAYVTSRGTSNVADSVKGRFTISRDNAKNTAYLQMNSLKPEDTAVYYCSVRTTSYPVDFWGQGTQVTVSSGGGGSGGGSEVQLVESGGGLVQPGNSLRLSCAASGFTFSSFGMSWVRQAPGKGLEWVSSISGSGSDTLYADSVKGRFTISRDNAKTTLYLQMNSLRPEDTAVYYCTIGGSLSRSSQGTLVTVSSGGGGSGGGSEVQLVESGGGLVQPGGSLKLSCAASGFTFNKYAMNWVRQAPGKGLEWVARIRSKYNNYATYYADSVKDRFTISRDDSKNTAYLQMNNLKTEDTAVYYCVRHGNFGNSYISYWAYWGQGTLVTVSSGGGGSGGGGSGGGGSQTVVTQEPSLTVSPGGTVTLTCGSSTGAVTSGNYPNWVQQKPGQAPRGLIGGTKFLAPGTPARFSGSLLGGKAALTLSGVQPEDEAEYYCVLWYSNRWVFGGGTKLTVLHHHHHH

SEQ ID NO: 3374 - protein, 507 aa, synthetic construct
  REGION 1..507: note = Description of Artificial Sequence: Synthetic polypeptide
QVQLVESGGGLVQAGGSLRLSCAASGSTSSINTMYWYRQAPGKERELVAFISSGGSTNVRDSVKGRFSVSRDSAKNIVYLQMNSLKPEDTAVYYCNTYIPYGGTLHDFWGQGTQVTVSSGGGGSGGGSEVQLVESGGGLVQPGNSLRLSCAASGFTFSSFGMSWVRQAPGKGLEWVSSISGSGSDTLYADSVKGRFTISRDNAKTTLYLQMNSLRPEDTAVYYCTIGGSLSRSSQGTLVTVSSGGGGSGGGSEVQLVESGGGLVQPGGSLKLSCAASGFTFNKYAMNWVRQAPGKGLEWVARIRSKYNNYATYYADSVKDRFTISRDDSKNTAYLQMNNLKTEDTAVYYCVRHGNFGNSYISYWAYWGQGTLVTVSSGGGGSGGGGSGGGGSQTVVTQEPSLTVSPGGTVTLTCGSSTGAVTSGNYPNWVQQKPGQAPRGLIGGTKFLAPGTPARFSGSLLGGKAALTLSGVQPEDEAEYYCVLWYSNRWVFGGGTKLTVLHHHHHH

SEQ ID NO: 3375 - protein, 499 aa, synthetic construct
  REGION 1..499: note = Description of Artificial Sequence: Synthetic polypeptide
QVQLVESGGGLVQPGGSLRLSCAASGGDWSANFMYWYRQAPGKQRELVARISGRGVVDYVESVKGRFTISRDNAKNTVYLQMNSLKPEDTAVYYCAVASYWGQGTQVTVSSGGGGSGGGSEVQLVESGGGLVQPGNSLRLSCAASGFTFSSFGMSWVRQAPGKGLEWVSSISGSGSDTLYADSVKGRFTISRDNAKTTLYLQMNSLRPEDTAVYYCTIGGSLSRSSQGTLVTVSSGGGGSGGGSEVQLVESGGGLVQPGGSLKLSCAASGFTFNKYAMNWVRQAPGKGLEWVARIRSKYNNYATYYADSVKDRFTISRDDSKNTAYLQMNNLKTEDTAVYYCVRHGNFGNSYISYWAYWGQGTLVTVSSGGGGSGGGGSGGGGSQTVVTQEPSLTVSPGGTVTLTCGSSTGAVTSGNYPNWVQQKPGQAPRGLIGGTKFLAPGTPARFSGSLLGGKAALTLSGVQPEDEAEYYCVLWYSNRWVFGGGTKLTVLHHHHHH

SEQ ID NO: 3376 - protein, 504 aa, synthetic construct
  REGION 1..504: note = Description of Artificial Sequence: Synthetic polypeptide
QVQLVESGGGVVQAGGSLTLSCAASGSTFSIRAMRWYRQAPGTERDLVAVIYGSSTYYADAVKGRFTISRDNSKNTLYLQMNSLRAEDTAVYYCNADTIGTARDYWGQGTLVTVSSGGGGSGGGSEVQLVESGGGLVQPGNSLRLSCAASGFTFSKFGMSWVRQAPGKGLEWVSSISGSGRDTLYADSVKGRFTISRDNAKTTLYLQMNSLRPEDTAVYYCTIGGSLSVSSQGTLVTVSSGGGGSGGGSEVQLVESGGGLVQPGGSLKLSCAASGFTFNKYAINWVRQAPGKGLEWVARIRSKYNNYATYYADQVKDRFTISRDDSKNTAYLQMNNLKTEDTAVYYCVRHANFGNSYISYWAYWGQGTLVTVSSGGGGSGGGGSGGGGSQTVVTQEPSLTVSPGGTVTLTCASSTGAVTSGNYPNWVQQKPGQAPRGLIGGTKFLVPGTPARFSGSLLGGKAALTLSGVQPEDEAEYYCTLWYSNRWVFGGGTKLTVLHHHHHH

SEQ ID NO: 3377 - protein, 503 aa, synthetic construct
  REGION 1..503: note = Description of Artificial Sequence: Synthetic polypeptide
QVQLVESGGALVQPGGSLRLSCAASGFPVNRYSMRWYRQAPGKEREWVAGMSSAGDRSSYEDSVKGRFTISRDDARNTVYLQMNSLKPEDTAVYYCNVNVGFEYWGQGTQVTVSSGGGGSGGGSEVQLVESGGGLVQPGNSLRLSCAASGFTFSKFGMSWVRQAPGKGLEWVSSISGSGRDTLYADSVKGRFTISRDNAKTTLYLQMNSLRPEDTAVYYCTIGGSLSVSSQGTLVTVSSGGGGSGGGSEVQLVESGGGLVQPGGSLKLSCAASGFTFNKYAINWVRQAPGKGLEWVARIRSKYNNYATYYADQVKDRFTISRDDSKNTAYLQMNNLKTEDTAVYYCVRHANFGNSYISYWAYWGQGTLVTVSSGGGGSGGGGSGGGGSQTVVTQEPSLTVSPGGTVTLTCASSTGAVTSGNYPNWVQQKPGQAPRGLIGGTKFLVPGTPARFSGSLLGGKAALTLSGVQPEDEAEYYCTLWYSNRWVFGGGTKLTVLHHHHHH

SEQ ID NO: 3378 - protein, 504 aa, synthetic construct
  REGION 1..504: note = Description of Artificial Sequence: Synthetic polypeptide
QVQLVESGGGVVQAGGSLRLSCAASGSTFSIRAMRWYRQAPGTERDLVAVIYGSSTYYADAVKGRFTISRDNSKNTLYLQMNSLRAEDTAVYYCNADTIGTARDYWGQGTLVTVSSGGGGSGGGSEVQLVESGGGLVQPGNSLRLSCAASGFTFSKFGMSWVRQAPGKGLEWVSSISGSGRDTLYADSVKGRFTISRDNAKTTLYLQMNSLRPEDTAVYYCTIGGSLSVSSQGTLVTVSSGGGGSGGGSEVQLVESGGGLVQPGGSLKLSCAASGNTFNKYAMNWVRQAPGKGLEWVARIRSKYNNYATYYADSVKDRFTISRDDSKNTAYLQMNNLKTEDTAVYYCVRHGNFGDSYISYWAYWGQGTLVTVSSGGGGSGGGGSGGGGSQTVVTQEPSLTVSPGGTVTLTCGSSTGAVTHGNYPNWVQQKPGQAPRGLIGGTKVLAPGTPARFSGSLLGGKAALTLSGVQPEDEAEYYCVLWYSNRWVFGGGTKLTVLHHHHHH

SEQ ID NO: 3379 - protein, 504 aa, synthetic construct
  REGION 1..504: note = Description of Artificial Sequence: Synthetic polypeptide
QVQLVESGGGVVQAGGSLRLSCAASGSTFSIRAMRWYRQAPGTERDLVAVIYGSSTYYADAVKGRFTISRDNSKNTLYLQMNSLRAEDTAVYYCNADTIGTARDYWGQGTLVTVSSGGGGSGGGSEVQLVESGGGLVQPGNSLRLSCAASGFTFSKFGMSWVRQAPGKGLEWVSSISGSGRDTLYADSVKGRFTISRDNAKTTLYLQMNSLRPEDTAVYYCTIGGSLSVSSQGTLVTVSSGGGGSGGGSEVQLVESGGGLVQPGGSLKLSCAASGFTFNKYAINWVRQAPGKGLEWVARIRSKYNNYATYYADQVKDRFTISRDDSKNTAYLQMNNLKTEDTAVYYCVRHANFGNSYISYWAYWGQGTLVTVSSGGGGSGGGGSGGGGSQTVVTQEPSLTVSPGGTVTLTCASSTGAVTSGNYPNWVQQKPGQAPRGLIGGTKFLVPGTPARFSGSLLGGKAALTLSGVQPEDEAEYYCTLWYSNRWVFGGGTKLTVLHHHHHH

SEQ ID NO: 3380 - protein, 509 aa, synthetic construct
  REGION 1..509: note = Description of Artificial Sequence: Synthetic polypeptide
QVQLQESGGGLVQAGGSLRLSCAASGSIAYIYTMDWYRQAPGKQRELVATSTRDGNVDYAESVKGRFTISRDNAKNTVYLQMNSLKPEDTAVYYCNADLRTAVDLIRANYWGQGTQVTVSSGGGGSGGGSEVQLVESGGGLVQPGNSLRLSCAASGFTFSKFGMSWVRQAPGKGLEWVSSISGSGRDTLYADSVKGRFTISRDNAKTTLYLQMNSLRPEDTAVYYCTIGGSLSVSSQGTLVTVSSGGGGSGGGSEVQLVESGGGLVQPGGSLKLSCAASGFTFNKYAINWVRQAPGKGLEWVARIRSKYNNYATYYADQVKDRFTISRDDSKNTAYLQMNNLKTEDTAVYYCVRHANFGNSYISYWAYWGQGTLVTVSSGGGGSGGGGSGGGGSQTVVTQEPSLTVSPGGTVTLTCASSTGAVTSGNYPNWVQQKPGQAPRGLIGGTKFLVPGTPARFSGSLLGGKAALTLSGVQPEDEAEYYCTLWYSNRWVFGGGTKLTVLHHHHHH

SEQ ID NO: 3381 - protein, 513 aa, synthetic construct
  REGION 1..513: note = Description of Artificial Sequence: Synthetic polypeptide
QVQLQESGGGLVQAGDSLRLSCVVSGRTDSWYVMGWFRQAPGKDREFVAGVSWSYGNTYYADSVKGRFTASRDNAKNTAYLQMNSLNAEDTAVYYCAARVSREVIPTRWDLYNYWGQGTQVTVSSGGGGSGGGSEVQLVESGGGLVQPGNSLRLSCAASGFTFSKFGMSWVRQAPGKGLEWVSSISGSGRDTLYADSVKGRFTISRDNAKTTLYLQMNSLRPEDTAVYYCTIGGSLSVSSQGTLVTVSSGGGGSGGGSEVQLVESGGGLVQPGGSLKLSCAASGFTFNKYAINWVRQAPGKGLEWVARIRSKYNNYATYYADQVKDRFTISRDDSKNTAYLQMNNLKTEDTAVYYCVRHANFGNSYISYWAYWGQGTLVTVSSGGGGSGGGGSGGGGSQTVVTQEPSLTVSPGGTVTLTCASSTGAVTSGNYPNWVQQKPGQAPRGLIGGTKFLVPGTPARFSGSLLGGKAALTLSGVQPEDEAEYYCTLWYSNRWVFGGGTKLTVLHHHHHH

SEQ ID NO: 3382 - protein, 502 aa, synthetic construct
  REGION 1..502: note = Description of Artificial Sequence: Synthetic polypeptide
QVQLQESGGGSVQPGGSLRVSCVVSRTIISINAMTWYHQAPGKRRELVAIITSGGETNYADSVKGRFTISRDNAKNTAYLQMNNLKPEDTGVYYCNVVPPLGSWGQGTQVTVSSGGGGSGGGSEVQLVESGGGLVQPGNSLRLSCAASGFTFSKFGMSWVRQAPGKGLEWVSSISGSGRDTLYADSVKGRFTISRDNAKTTLYLQMNSLRPEDTAVYYCTIGGSLSVSSQGTLVTVSSGGGGSGGGSEVQLVESGGGLVQPGGSLKLSCAASGFTFNKYAINWVRQAPGKGLEWVARIRSKYNNYATYYADQVKDRFTISRDDSKNTAYLQMNNLKTEDTAVYYCVRHANFGNSYISYWAYWGQGTLVTVSSGGGGSGGGGSGGGGSQTVVTQEPSLTVSPGGTVTLTCASSTGAVTSGNYPNWVQQKPGQAPRGLIGGTKFLVPGTPARFSGSLLGGKAALTLSGVQPEDEAEYYCTLWYSNRWVFGGGTKLTVLHHHHHH

SEQ ID NO: 3383 - protein, 515 aa, synthetic construct
  REGION 1..515: note = Description of Artificial Sequence: Synthetic polypeptide
QVQLQESGGGRVQAGGSLRLSCSASARTLRLYAVGWFRQAPGKEREFVAGIGRSERTYYTDSVKGRFTLSRDNAKNTVFLEMNDLEPEDTAVYFCALTFQTTDMVDVPTTQHEYDYWGRGTQVTVSSGGGGSGGGSEVQLVESGGGLVQPGNSLRLSCAASGFTFSKFGMSWVRQAPGKGLEWVSSISGSGRDTLYADSVKGRFTISRDNAKTTLYLQMNSLRPEDTAVYYCTIGGSLSVSSQGTLVTVSSGGGGSGGGSEVQLVESGGGLVQPGGSLKLSCAASGFTFNKYAINWVRQAPGKGLEWVARIRSKYNNYATYYADQVKDRFTISRDDSKNTAYLQMNNLKTEDTAVYYCVRHANFGNSYISYWAYWGQGTLVTVSSGGGGSGGGGSGGGGSQTVVTQEPSLTVSPGGTVTLTCASSTGAVTSGNYPNWVQQKPGQAPRGLIGGTKFLVPGTPARFSGSLLGGKAALTLSGVQPEDEAEYYCTLWYSNRWVFGGGTKLTVLHHHHHH

SEQ ID NO: 3384 - protein, 509 aa, synthetic construct
  REGION 1..509: note = Description of Artificial Sequence: Synthetic polypeptide
QVQLQESGGGLVQAGGSLRLSCAASGSIAYIYTMDWYRQAPGKQRELVATSTHDGNTDYADSVKGRFTISRDNVKNTVYLQMNSLKPEDTAVYYCNADLRTAVDLIRANYWGQGTQVTVSSGGGGSGGGSEVQLVESGGGLVQPGNSLRLSCAASGFTFSKFGMSWVRQAPGKGLEWVSSISGSGRDTLYADSVKGRFTISRDNAKTTLYLQMNSLRPEDTAVYYCTIGGSLSVSSQGTLVTVSSGGGGSGGGSEVQLVESGGGLVQPGGSLKLSCAASGFTFNKYAINWVRQAPGKGLEWVARIRSKYNNYATYYADQVKDRFTISRDDSKNTAYLQMNNLKTEDTAVYYCVRHANFGNSYISYWAYWGQGTLVTVSSGGGGSGGGGSGGGGSQTVVTQEPSLTVSPGGTVTLTCASSTGAVTSGNYPNWVQQKPGQAPRGLIGGTKFLVPGTPARFSGSLLGGKAALTLSGVQPEDEAEYYCTLWYSNRWVFGGGTKLTVLHHHHHH

SEQ ID NO: 3385 - protein, 499 aa, synthetic construct
  REGION 1..499: note = Description of Artificial Sequence: Synthetic polypeptide
QVQLQESGGGLVQAGGSLRLSCAASGVTFSINYIDWYRQAPGKQREWVAQITRDSNSFYADSVKGRFAISRDNAKNTVYLQMNNLKPEDTAVYYCRVLSYWGQGTQVTVSSGGGGSGGGSEVQLVESGGGLVQPGNSLRLSCAASGFTFSKFGMSWVRQAPGKGLEWVSSISGSGRDTLYADSVKGRFTISRDNAKTTLYLQMNSLRPEDTAVYYCTIGGSLSVSSQGTLVTVSSGGGGSGGGSEVQLVESGGGLVQPGGSLKLSCAASGFTFNKYAINWVRQAPGKGLEWVARIRSKYNNYATYYADQVKDRFTISRDDSKNTAYLQMNNLKTEDTAVYYCVRHANFGNSYISYWAYWGQGTLVTVSSGGGGSGGGGSGGGGSQTVVTQEPSLTVSPGGTVTLTCASSTGAVTSGNYPNWVQQKPGQAPRGLIGGTKFLVPGTPARFSGSLLGGKAALTLSGVQPEDEAEYYCTLWYSNRWVFGGGTKLTVLHHHHHH

SEQ ID NO: 3386 - protein, 499 aa, synthetic construct
  REGION 1..499: note = Description of Artificial Sequence: Synthetic polypeptide
QVQLQESGGGLVQAGGSLRLSCEASGPTFSINYIDWYRQAPGKQREWVAQITRDSNSFYADSVKGRFAVSRDNAKNTVYLQMNSLKPEDTAVYYCRVLSYWGQGTQVTVSSGGGGSGGGSEVQLVESGGGLVQPGNSLRLSCAASGFTFSKFGMSWVRQAPGKGLEWVSSISGSGRDTLYADSVKGRFTISRDNAKTTLYLQMNSLRPEDTAVYYCTIGGSLSVSSQGTLVTVSSGGGGSGGGSEVQLVESGGGLVQPGGSLKLSCAASGFTFNKYAINWVRQAPGKGLEWVARIRSKYNNYATYYADQVKDRFTISRDDSKNTAYLQMNNLKTEDTAVYYCVRHANFGNSYISYWAYWGQGTLVTVSSGGGGSGGGGSGGGGSQTVVTQEPSLTVSPGGTVTLTCASSTGAVTSGNYPNWVQQKPGQAPRGLIGGTKFLVPGTPARFSGSLLGGKAALTLSGVQPEDEAEYYCTLWYSNRWVFGGGTKLTVLHHHHHH

SEQ ID NO: 3387 - protein, 499 aa, synthetic construct
  REGION 1..499: note = Description of Artificial Sequence: Synthetic polypeptide
QVQLQESGGGLVQAGGSLRLSCAASGVTFSINYIDWYRQAPGKQREWVAQITRDSNSFYADSVKGRFAISRDNAKNTVYLQMNSLKPEDTAVYYCRVLSYWGQGTQVTVSSGGGGSGGGSEVQLVESGGGLVQPGNSLRLSCAASGFTFSKFGMSWVRQAPGKGLEWVSSISGSGRDTLYADSVKGRFTISRDNAKTTLYLQMNSLRPEDTAVYYCTIGGSLSVSSQGTLVTVSSGGGGSGGGSEVQLVESGGGLVQPGGSLKLSCAASGFTFNKYAINWVRQAPGKGLEWVARIRSKYNNYATYYADQVKDRFTISRDDSKNTAYLQMNNLKTEDTAVYYCVRHANFGNSYISYWAYWGQGTLVTVSSGGGGSGGGGSGGGGSQTVVTQEPSLTVSPGGTVTLTCASSTGAVTSGNYPNWVQQKPGQAPRGLIGGTKFLVPGTPARFSGSLLGGKAALTLSGVQPEDEAEYYCTLWYSNRWVFGGGTKLTVLHHHHHH

SEQ ID NO: 3388 - protein, 499 aa, synthetic construct
  REGION 1..499: note = Description of Artificial Sequence: Synthetic polypeptide
QVQLQESGGGLVQAGGSLRLSCAASGSTFSRNYIDWYRQAPGKQREWVAQITSGGNTHYEPSLKGRFTISRDNAKNTAYLQMNSLKPEDTAVYYCRILDYWGQGTQVTVSSGGGGSGGGSEVQLVESGGGLVQPGNSLRLSCAASGFTFSKFGMSWVRQAPGKGLEWVSSISGSGRDTLYADSVKGRFTISRDNAKTTLYLQMNSLRPEDTAVYYCTIGGSLSVSSQGTLVTVSSGGGGSGGGSEVQLVESGGGLVQPGGSLKLSCAASGFTFNKYAINWVRQAPGKGLEWVARIRSKYNNYATYYADQVKDRFTISRDDSKNTAYLQMNNLKTEDTAVYYCVRHANFGNSYISYWAYWGQGTLVTVSSGGGGSGGGGSGGGGSQTVVTQEPSLTVSPGGTVTLTCASSTGAVTSGNYPNWVQQKPGQAPRGLIGGTKFLVPGTPARFSGSLLGGKAALTLSGVQPEDEAEYYCTLWYSNRWVFGGGTKLTVLHHHHHH

SEQ ID NO: 3389 - protein, 499 aa, synthetic construct
  REGION 1..499: note = Description of Artificial Sequence: Synthetic polypeptide
QVQLQESGGGLVQAGGSLRLSCAASGVTFSASYIDWYRQAPGNEREWVAQITRGGDSFYADSVKGRFAISRDNAKNTVYLQMNSLKPEDTAVYYCRVLSYWGQGTQVTVSSGGGGSGGGSEVQLVESGGGLVQPGNSLRLSCAASGFTFSKFGMSWVRQAPGKGLEWVSSISGSGRDTLYADSVKGRFTISRDNAKTTLYLQMNSLRPEDTAVYYCTIGGSLSVSSQGTLVTVSSGGGGSGGGSEVQLVESGGGLVQPGGSLKLSCAASGFTFNKYAINWVRQAPGKGLEWVARIRSKYNNYATYYADQVKDRFTISRDDSKNTAYLQMNNLKTEDTAVYYCVRHANFGNSYISYWAYWGQGTLVTVSSGGGGSGGGGSGGGGSQTVVTQEPSLTVSPGGTVTLTCASSTGAVTSGNYPNWVQQKPGQAPRGLIGGTKFLVPGTPARFSGSLLGGKAALTLSGVQPEDEAEYYCTLWYSNRWVFGGGTKLTVLHHHHHH

SEQ ID NO: 3390 - protein, 499 aa, synthetic construct
  REGION 1..499: note = Description of Artificial Sequence: Synthetic polypeptide
QVQLQESGGGLVQAGGSLRLSCAASGSTFNNYAMDWFRQAPGKQREWVAQITRDSSSFYADSVKGRFAISRDNAKNTVYLQMNSLKPEDTAVYYCRVLSYWGQGTQVTVSSGGGGSGGGSEVQLVESGGGLVQPGNSLRLSCAASGFTFSKFGMSWVRQAPGKGLEWVSSISGSGRDTLYADSVKGRFTISRDNAKTTLYLQMNSLRPEDTAVYYCTIGGSLSVSSQGTLVTVSSGGGGSGGGSEVQLVESGGGLVQPGGSLKLSCAASGFTFNKYAINWVRQAPGKGLEWVARIRSKYNNYATYYADQVKDRFTISRDDSKNTAYLQMNNLKTEDTAVYYCVRHANFGNSYISYWAYWGQGTLVTVSSGGGGSGGGGSGGGGSQTVVTQEPSLTVSPGGTVTLTCASSTGAVTSGNYPNWVQQKPGQAPRGLIGGTKFLVPGTPARFSGSLLGGKAALTLSGVQPEDEAEYYCTLWYSNRWVFGGGTKLTVLHHHHHH

SEQ ID NO: 3391 - protein, 499 aa, synthetic construct
  REGION 1..499: note = Description of Artificial Sequence: Synthetic polypeptide
QVQLQESGGGLVQAGGSLRLSCAASGVTFSINYIDWYRQAPGKQREWVAQITRDSNSFYADSVKGRFAISRDNAKNTVYLQMNSLKPEDTAVYYCRLLSYWGQGTQVTVSSGGGGSGGGSEVQLVESGGGLVQPGNSLRLSCAASGFTFSKFGMSWVRQAPGKGLEWVSSISGSGRDTLYADSVKGRFTISRDNAKTTLYLQMNSLRPEDTAVYYCTIGGSLSVSSQGTLVTVSSGGGGSGGGSEVQLVESGGGLVQPGGSLKLSCAASGFTFNKYAINWVRQAPGKGLEWVARIRSKYNNYATYYADQVKDRFTISRDDSKNTAYLQMNNLKTEDTAVYYCVRHANFGNSYISYWAYWGQGTLVTVSSGGGGSGGGGSGGGGSQTVVTQEPSLTVSPGGTVTLTCASSTGAVTSGNYPNWVQQKPGQAPRGLIGGTKFLVPGTPARFSGSLLGGKAALTLSGVQPEDEAEYYCTLWYSNRWVFGGGTKLTVLHHHHHH

SEQ ID NO: 3392 - protein, 499 aa, synthetic construct
  REGION 1..499: note = Description of Artificial Sequence: Synthetic polypeptide
QVQLQESGGGLVQAGGSLRLSCAASGVTFSINYIDWYRQAPGKQREWVAQITRDDTSFYADSVKGRFAISRDNAKNTVYLQMNNLRPEDTAVYYCRLLSFWGQGTQVTVSSGGGGSGGGSEVQLVESGGGLVQPGNSLRLSCAASGFTFSKFGMSWVRQAPGKGLEWVSSISGSGRDTLYADSVKGRFTISRDNAKTTLYLQMNSLRPEDTAVYYCTIGGSLSVSSQGTLVTVSSGGGGSGGGSEVQLVESGGGLVQPGGSLKLSCAASGFTFNKYAINWVRQAPGKGLEWVARIRSKYNNYATYYADQVKDRFTISRDDSKNTAYLQMNNLKTEDTAVYYCVRHANFGNSYISYWAYWGQGTLVTVSSGGGGSGGGGSGGGGSQTVVTQEPSLTVSPGGTVTLTCASSTGAVTSGNYPNWVQQKPGQAPRGLIGGTKFLVPGTPARFSGSLLGGKAALTLSGVQPEDEAEYYCTLWYSNRWVFGGGTKLTVLHHHHHH

SEQ ID NO: 3393 - protein, 499 aa, synthetic construct
  REGION 1..499: note = Description of Artificial Sequence: Synthetic polypeptide
QVQLQESGGGLVQPGGSLRLSCAASGSTFGRNYIDWYRQAPGKQREWVAQITSGGNTHYEPSLKGRFTISRDNAKNTAYLQMNSLKPEDTAVYYCRILDYWGQGTQVTVSSGGGGSGGGSEVQLVESGGGLVQPGNSLRLSCAASGFTFSKFGMSWVRQAPGKGLEWVSSISGSGRDTLYADSVKGRFTISRDNAKTTLYLQMNSLRPEDTAVYYCTIGGSLSVSSQGTLVTVSSGGGGSGGGSEVQLVESGGGLVQPGGSLKLSCAASGFTFNKYAINWVRQAPGKGLEWVARIRSKYNNYATYYADQVKDRFTISRDDSKNTAYLQMNNLKTEDTAVYYCVRHANFGNSYISYWAYWGQGTLVTVSSGGGGSGGGGSGGGGSQTVVTQEPSLTVSPGGTVTLTCASSTGAVTSGNYPNWVQQKPGQAPRGLIGGTKFLVPGTPARFSGSLLGGKAALTLSGVQPEDEAEYYCTLWYSNRWVFGGGTKLTVLHHHHHH

SEQ ID NO: 3394 - protein, 499 aa, synthetic construct
  REGION 1..499: note = Description of Artificial Sequence: Synthetic polypeptide
QVQLQESGGGLVQAGGSLRLSCKASGVTFSINYIDWYRQAPGKQREWVAQITRDGSSFYADSVKGRFAISRDNAKNTVYLQMNSLKPEDTAVYYCRILSDWGQGTQVTVSSGGGGSGGGSEVQLVESGGGLVQPGNSLRLSCAASGFTFSKFGMSWVRQAPGKGLEWVSSISGSGRDTLYADSVKGRFTISRDNAKTTLYLQMNSLRPEDTAVYYCTIGGSLSVSSQGTLVTVSSGGGGSGGGSEVQLVESGGGLVQPGGSLKLSCAASGFTFNKYAINWVRQAPGKGLEWVARIRSKYNNYATYYADQVKDRFTISRDDSKNTAYLQMNNLKTEDTAVYYCVRHANFGNSYISYWAYWGQGTLVTVSSGGGGSGGGGSGGGGSQTVVTQEPSLTVSPGGTVTLTCASSTGAVTSGNYPNWVQQKPGQAPRGLIGGTKFLVPGTPARFSGSLLGGKAALTLSGVQPEDEAEYYCTLWYSNRWVFGGGTKLTVLHHHHHH

SEQ ID NO: 3395 - protein, 499 aa, synthetic construct
  REGION 1..499: note = Description of Artificial Sequence: Synthetic polypeptide
QVQLQESGGGLVQAGDSLRLSCAASGVTFSASYIDWYRQAPGNEREWVAQITRGGDSFYADSVKGRFAISRDNAKNTVYLQMNSLKPEDTAVYYCRVLSYWGQGTQVTVSSGGGGSGGGSEVQLVESGGGLVQPGNSLRLSCAASGFTFSKFGMSWVRQAPGKGLEWVSSISGSGRDTLYADSVKGRFTISRDNAKTTLYLQMNSLRPEDTAVYYCTIGGSLSVSSQGTLVTVSSGGGGSGGGSEVQLVESGGGLVQPGGSLKLSCAASGFTFNKYAINWVRQAPGKGLEWVARIRSKYNNYATYYADQVKDRFTISRDDSKNTAYLQMNNLKTEDTAVYYCVRHANFGNSYISYWAYWGQGTLVTVSSGGGGSGGGGSGGGGSQTVVTQEPSLTVSPGGTVTLTCASSTGAVTSGNYPNWVQQKPGQAPRGLIGGTKFLVPGTPARFSGSLLGGKAALTLSGVQPEDEAEYYCTLWYSNRWVFGGGTKLTVLHHHHHH

SEQ ID NO: 3396 - protein, 499 aa, synthetic construct
  REGION 1..499: note = Description of Artificial Sequence: Synthetic polypeptide
QVQLQESGGGLVQPGGSLRLSCAASGVTFSINYIDWYRQAPGKQREWVAQITRDSNSFYADSVKGRFAISRENAKNTVYLQMNSLKPEDTAVYYCRVLSYWGQGTQVTVSSGGGGSGGGSEVQLVESGGGLVQPGNSLRLSCAASGFTFSKFGMSWVRQAPGKGLEWVSSISGSGRDTLYADSVKGRFTISRDNAKTTLYLQMNSLRPEDTAVYYCTIGGSLSVSSQGTLVTVSSGGGGSGGGSEVQLVESGGGLVQPGGSLKLSCAASGFTFNKYAINWVRQAPGKGLEWVARIRSKYNNYATYYADQVKDRFTISRDDSKNTAYLQMNNLKTEDTAVYYCVRHANFGNSYISYWAYWGQGTLVTVSSGGGGSGGGGSGGGGSQTVVTQEPSLTVSPGGTVTLTCASSTGAVTSGNYPNWVQQKPGQAPRGLIGGTKFLVPGTPARFSGSLLGGKAALTLSGVQPEDEAEYYCTLWYSNRWVFGGGTKLTVLHHHHHH

SEQ ID NO: 3397 - protein, 499 aa, synthetic construct
  REGION 1..499: note = Description of Artificial Sequence: Synthetic polypeptide
QVQLQESGGGLVQAGGSLRLSCQASGVTFNINYIDWYRQAPGRQREWVAQITRDSTRFYADSVKGRFAISRDNAKNMVYLQLNSLKPEDTAVYYCRILSYWGQGTQVTVSSGGGGSGGGSEVQLVESGGGLVQPGNSLRLSCAASGFTFSKFGMSWVRQAPGKGLEWVSSISGSGRDTLYADSVKGRFTISRDNAKTTLYLQMNSLRPEDTAVYYCTIGGSLSVSSQGTLVTVSSGGGGSGGGSEVQLVESGGGLVQPGGSLKLSCAASGFTFNKYAINWVRQAPGKGLEWVARIRSKYNNYATYYADQVKDRFTISRDDSKNTAYLQMNNLKTEDTAVYYCVRHANFGNSYISYWAYWGQGTLVTVSSGGGGSGGGGSGGGGSQTVVTQEPSLTVSPGGTVTLTCASSTGAVTSGNYPNWVQQKPGQAPRGLIGGTKFLVPGTPARFSGSLLGGKAALTLSGVQPEDEAEYYCTLWYSNRWVFGGGTKLTVLHHHHHH

SEQ ID NO: 3398 - protein, 499 aa, synthetic construct
  REGION 1..499: note = Description of Artificial Sequence: Synthetic polypeptide
QVQLQESGGGLVQPGGSLRLSCAASGFDFSISYIDWYRQAPGNEREWVAQITRGGDSFYADSVKGRFAISRDNAKNTVYLQMNSLKPEDTAVYYCRILSYWGQGTQVTVSSGGGGSGGGSEVQLVESGGGLVQPGNSLRLSCAASGFTFSKFGMSWVRQAPGKGLEWVSSISGSGRDTLYADSVKGRFTISRDNAKTTLYLQMNSLRPEDTAVYYCTIGGSLSVSSQGTLVTVSSGGGGSGGGSEVQLVESGGGLVQPGGSLKLSCAASGFTFNKYAINWVRQAPGKGLEWVARIRSKYNNYATYYADQVKDRFTISRDDSKNTAYLQMNNLKTEDTAVYYCVRHANFGNSYISYWAYWGQGTLVTVSSGGGGSGGGGSGGGGSQTVVTQEPSLTVSPGGTVTLTCASSTGAVTSGNYPNWVQQKPGQAPRGLIGGTKFLVPGTPARFSGSLLGGKAALTLSGVQPEDEAEYYCTLWYSNRWVFGGGTKLTVLHHHHHH

SEQ ID NO: 3399 - protein, 499 aa, synthetic construct
  REGION 1..499: note = Description of Artificial Sequence: Synthetic polypeptide
QVQLQESGGGLVQAGGSLRLSCAASGSTFSRNYIDWYRQAPGKQREWVAQITSAGNTHYEPSLKGRFTISRDNAKNTAYLQMNSLKPEDTAVYYCRILDYWGQGTQVTVSSGGGGSGGGSEVQLVESGGGLVQPGNSLRLSCAASGFTFSKFGMSWVRQAPGKGLEWVSSISGSGRDTLYADSVKGRFTISRDNAKTTLYLQMNSLRPEDTAVYYCTIGGSLSVSSQGTLVTVSSGGGGSGGGSEVQLVESGGGLVQPGGSLKLSCAASGFTFNKYAINWVRQAPGKGLEWVARIRSKYNNYATYYADQVKDRFTISRDDSKNTAYLQMNNLKTEDTAVYYCVRHANFGNSYISYWAYWGQGTLVTVSSGGGGSGGGGSGGGGSQTVVTQEPSLTVSPGGTVTLTCASSTGAVTSGNYPNWVQQKPGQAPRGLIGGTKFLVPGTPARFSGSLLGGKAALTLSGVQPEDEAEYYCTLWYSNRWVFGGGTKLTVLHHHHHH

SEQ ID NO: 3400 - protein, 499 aa, synthetic construct
  REGION 1..499: note = Description of Artificial Sequence: Synthetic polypeptide
QVQLQESGGGLVQPGGSLRLSCAASGVTFSISYIDWYRQAPGNEREWVAQITRGGDSFYADSVKGRFAISRDNAKNTVYLQMNSLKPEDTAVYYCRILSYWGQGTQVTVSSGGGGSGGGSEVQLVESGGGLVQPGNSLRLSCAASGFTFSKFGMSWVRQAPGKGLEWVSSISGSGRDTLYADSVKGRFTISRDNAKTTLYLQMNSLRPEDTAVYYCTIGGSLSVSSQGTLVTVSSGGGGSGGGSEVQLVESGGGLVQPGGSLKLSCAASGFTFNKYAINWVRQAPGKGLEWVARIRSKYNNYATYYADQVKDRFTISRDDSKNTAYLQMNNLKTEDTAVYYCVRHANFGNSYISYWAYWGQGTLVTVSSGGGGSGGGGSGGGGSQTVVTQEPSLTVSPGGTVTLTCASSTGAVTSGNYPNWVQQKPGQAPRGLIGGTKFLVPGTPARFSGSLLGGKAALTLSGVQPEDEAEYYCTLWYSNRWVFGGGTKLTVLHHHHHH

SEQ ID NO: 3401 - protein, 499 aa, synthetic construct
  REGION 1..499: note = Description of Artificial Sequence: Synthetic polypeptide
QVQLQESGGGLVQAGGSLRLSCAASGVTFSINYIDWYRQAPGKQREWVAQITRDSNSFYADSVKGRFAVSRDNAKNTVYLQMNSLKPEDTAVYYCRVLSYWGQGTQVTVSSGGGGSGGGSEVQLVESGGGLVQPGNSLRLSCAASGFTFSKFGMSWVRQAPGKGLEWVSSISGSGRDTLYADSVKGRFTISRDNAKTTLYLQMNSLRPEDTAVYYCTIGGSLSVSSQGTLVTVSSGGGGSGGGSEVQLVESGGGLVQPGGSLKLSCAASGFTFNKYAINWVRQAPGKGLEWVARIRSKYNNYATYYADQVKDRFTISRDDSKNTAYLQMNNLKTEDTAVYYCVRHANFGNSYISYWAYWGQGTLVTVSSGGGGSGGGGSGGGGSQTVVTQEPSLTVSPGGTVTLTCASSTGAVTSGNYPNWVQQKPGQAPRGLIGGTKFLVPGTPARFSGSLLGGKAALTLSGVQPEDEAEYYCTLWYSNRWVFGGGTKLTVLHHHHHH

SEQ ID NO: 3402 - protein, 499 aa, synthetic construct
  REGION 1..499: note = Description of Artificial Sequence: Synthetic polypeptide
QVQLQESGGGLVQPGGSLTLSCAASGSTFSRNYIDWYRQAPGKQREWVAQITSGGNTHYEPSLKGRFTISRDNAKNTAYLQMNSLKPEDTAVYYCRILDYWGQGTQVTVSSGGGGSGGGSEVQLVESGGGLVQPGNSLRLSCAASGFTFSKFGMSWVRQAPGKGLEWVSSISGSGRDTLYADSVKGRFTISRDNAKTTLYLQMNSLRPEDTAVYYCTIGGSLSVSSQGTLVTVSSGGGGSGGGSEVQLVESGGGLVQPGGSLKLSCAASGFTFNKYAINWVRQAPGKGLEWVARIRSKYNNYATYYADQVKDRFTISRDDSKNTAYLQMNNLKTEDTAVYYCVRHANFGNSYISYWAYWGQGTLVTVSSGGGGSGGGGSGGGGSQTVVTQEPSLTVSPGGTVTLTCASSTGAVTSGNYPNWVQQKPGQAPRGLIGGTKFLVPGTPARFSGSLLGGKAALTLSGVQPEDEAEYYCTLWYSNRWVFGGGTKLTVLHHHHHH

SEQ ID NO: 3403 - protein, 499 aa, synthetic construct
  REGION 1..499: note = Description of Artificial Sequence: Synthetic polypeptide
QVQLQESGGGLVQAGGSLRLSCAASGSTFSKNYIDWYRQAPGKQREWVAQITSGGNTHYEPSLKGRFTISRDNAKNTAYLQMNSLKPEDTAVYYCRILDYWGQGTQVTVSSGGGGSGGGSEVQLVESGGGLVQPGNSLRLSCAASGFTFSKFGMSWVRQAPGKGLEWVSSISGSGRDTLYADSVKGRFTISRDNAKTTLYLQMNSLRPEDTAVYYCTIGGSLSVSSQGTLVTVSSGGGGSGGGSEVQLVESGGGLVQPGGSLKLSCAASGFTFNKYAINWVRQAPGKGLEWVARIRSKYNNYATYYADQVKDRFTISRDDSKNTAYLQMNNLKTEDTAVYYCVRHANFGNSYISYWAYWGQGTLVTVSSGGGGSGGGGSGGGGSQTVVTQEPSLTVSPGGTVTLTCASSTGAVTSGNYPNWVQQKPGQAPRGLIGGTKFLVPGTPARFSGSLLGGKAALTLSGVQPEDEAEYYCTLWYSNRWVFGGGTKLTVLHHHHHH

SEQ ID NO: 3404 - protein, 499 aa, synthetic construct
  REGION 1..499: note = Description of Artificial Sequence: Synthetic polypeptide
QVQLQESGGGLVQAGGSLRLSCAASGSTSSRNYIDWYRQAPGKQREWVAQITSGGNTHYEPSLKGRFTISRDNAKNTAYLQMNSLKPEDTAVYYCRILDYWGQGTQVTVSSGGGGSGGGSEVQLVESGGGLVQPGNSLRLSCAASGFTFSKFGMSWVRQAPGKGLEWVSSISGSGRDTLYADSVKGRFTISRDNAKTTLYLQMNSLRPEDTAVYYCTIGGSLSVSSQGTLVTVSSGGGGSGGGSEVQLVESGGGLVQPGGSLKLSCAASGFTFNKYAINWVRQAPGKGLEWVARIRSKYNNYATYYADQVKDRFTISRDDSKNTAYLQMNNLKTEDTAVYYCVRHANFGNSYISYWAYWGQGTLVTVSSGGGGSGGGGSGGGGSQTVVTQEPSLTVSPGGTVTLTCASSTGAVTSGNYPNWVQQKPGQAPRGLIGGTKFLVPGTPARFSGSLLGGKAALTLSGVQPEDEAEYYCTLWYSNRWVFGGGTKLTVLHHHHHH

SEQ ID NO: 3405 - protein, 499 aa, synthetic construct
  REGION 1..499: note = Description of Artificial Sequence: Synthetic polypeptide
QVQLQESGGGLVQAGGSLRLSCSASGSTFSRNYIDWYRQAPGKQREWVAQITSGGNTHYEPSLKGRFTISRDNAKNTAYLQMNSLKPEDTAVYYCRILDYWGQGTQVTVSSGGGGSGGGSEVQLVESGGGLVQPGNSLRLSCAASGFTFSKFGMSWVRQAPGKGLEWVSSISGSGRDTLYADSVKGRFTISRDNAKTTLYLQMNSLRPEDTAVYYCTIGGSLSVSSQGTLVTVSSGGGGSGGGSEVQLVESGGGLVQPGGSLKLSCAASGFTFNKYAINWVRQAPGKGLEWVARIRSKYNNYATYYADQVKDRFTISRDDSKNTAYLQMNNLKTEDTAVYYCVRHANFGNSYISYWAYWGQGTLVTVSSGGGGSGGGGSGGGGSQTVVTQEPSLTVSPGGTVTLTCASSTGAVTSGNYPNWVQQKPGQAPRGLIGGTKFLVPGTPARFSGSLLGGKAALTLSGVQPEDEAEYYCTLWYSNRWVFGGGTKLTVLHHHHHH

SEQ ID NO: 3406 - protein, 499 aa, synthetic construct
  REGION 1..499: note = Description of Artificial Sequence: Synthetic polypeptide
QVQLQESGGGLVQPGDPLRLSCAASGSTFSRNYIDWYRQAPGKQREWVAQITSGGNTHYEPSLKGRFTISRDNAKNTAYLQMNSLKPEDTAVYYCRILDYWGQGTQVTVSSGGGGSGGGSEVQLVESGGGLVQPGNSLRLSCAASGFTFSKFGMSWVRQAPGKGLEWVSSISGSGRDTLYADSVKGRFTISRDNAKTTLYLQMNSLRPEDTAVYYCTIGGSLSVSSQGTLVTVSSGGGGSGGGSEVQLVESGGGLVQPGGSLKLSCAASGFTFNKYAINWVRQAPGKGLEWVARIRSKYNNYATYYADQVKDRFTISRDDSKNTAYLQMNNLKTEDTAVYYCVRHANFGNSYISYWAYWGQGTLVTVSSGGGGSGGGGSGGGGSQTVVTQEPSLTVSPGGTVTLTCASSTGAVTSGNYPNWVQQKPGQAPRGLIGGTKFLVPGTPARFSGSLLGGKAALTLSGVQPEDEAEYYCTLWYSNRWVFGGGTKLTVLHHHHHH

SEQ ID NO: 3407 - protein, 513 aa, synthetic construct
  REGION 1..513: note = Description of Artificial Sequence: Synthetic polypeptide
QVQLQESGGGLVQAGGSLRLSCAVSGRTFSGFGTGWFRQAPGKEREFVAAISWAGGRTHYEDSVKGRFTIHRDNAKNTVYLQMNSLKPEDTAVYYCAAQVSRAYDGIWYSGGDYWGQGTQVTVSSGGGGSGGGSEVQLVESGGGLVQPGNSLRLSCAASGFTFSKFGMSWVRQAPGKGLEWVSSISGSGRDTLYADSVKGRFTISRDNAKTTLYLQMNSLRPEDTAVYYCTIGGSLSVSSQGTLVTVSSGGGGSGGGSEVQLVESGGGLVQPGGSLKLSCAASGFTFNKYAINWVRQAPGKGLEWVARIRSKYNNYATYYADQVKDRFTISRDDSKNTAYLQMNNLKTEDTAVYYCVRHANFGNSYISYWAYWGQGTLVTVSSGGGGSGGGGSGGGGSQTVVTQEPSLTVSPGGTVTLTCASSTGAVTSGNYPNWVQQKPGQAPRGLIGGTKFLVPGTPARFSGSLLGGKAALTLSGVQPEDEAEYYCTLWYSNRWVFGGGTKLTVLHHHHHH

SEQ ID NO: 3408 - protein, 513 aa, synthetic construct
  REGION 1..513: note = Description of Artificial Sequence: Synthetic polypeptide
QVQLQESGGGLVQAGGSLRLSCAVSGRTFSGFGTGWFRQAPGKEREFVAAISWDGGRTHYADFVKGRFTISRDNAKNTVYLQMNSLKPEDTAVYYCAAQVARAYDSKWYSGGDYWGQGTQVTVSSGGGGSGGGSEVQLVESGGGLVQPGNSLRLSCAASGFTFSKFGMSWVRQAPGKGLEWVSSISGSGRDTLYADSVKGRFTISRDNAKTTLYLQMNSLRPEDTAVYYCTIGGSLSVSSQGTLVTVSSGGGGSGGGSEVQLVESGGGLVQPGGSLKLSCAASGFTFNKYAINWVRQAPGKGLEWVARIRSKYNNYATYYADQVKDRFTISRDDSKNTAYLQMNNLKTEDTAVYYCVRHANFGNSYISYWAYWGQGTLVTVSSGGGGSGGGGSGGGGSQTVVTQEPSLTVSPGGTVTLTCASSTGAVTSGNYPNWVQQKPGQAPRGLIGGTKFLVPGTPARFSGSLLGGKAALTLSGVQPEDEAEYYCTLWYSNRWVFGGGTKLTVLHHHHHH

SEQ ID NO: 3409 - protein, 513 aa, synthetic construct
  REGION 1..513: note = Description of Artificial Sequence: Synthetic polypeptide
QVQLQESGGGLVQAGGSLRLSCAVSGRTFSGFGTGWFRQAPGKEREFVAAISWVGGRTHYADSVKGRFTISRDNAKNTVYLQMNSLKPEDTAVYYCAAQVARAYDGNWYSGGDYWGQGTQVTVSSGGGGSGGGSEVQLVESGGGLVQPGNSLRLSCAASGFTFSKFGMSWVRQAPGKGLEWVSSISGSGRDTLYADSVKGRFTISRDNAKTTLYLQMNSLRPEDTAVYYCTIGGSLSVSSQGTLVTVSSGGGGSGGGSEVQLVESGGGLVQPGGSLKLSCAASGFTFNKYAINWVRQAPGKGLEWVARIRSKYNNYATYYADQVKDRFTISRDDSKNTAYLQMNNLKTEDTAVYYCVRHANFGNSYISYWAYWGQGTLVTVSSGGGGSGGGGSGGGGSQTVVTQEPSLTVSPGGTVTLTCASSTGAVTSGNYPNWVQQKPGQAPRGLIGGTKFLVPGTPARFSGSLLGGKAALTLSGVQPEDEAEYYCTLWYSNRWVFGGGTKLTVLHHHHHH

SEQ ID NO: 3410 - protein, 513 aa, synthetic construct
  REGION 1..513: note = Description of Artificial Sequence: Synthetic polypeptide
QVQLQESGGGLVQAGGSLRLSCAVSGRTFSGFGTGWFRQAPGKEREFVAAISWSGGRTHYADSVKGRFTISRDNAKNTVYLQMNSLKPEDTAVYYCAGQVARAYDGNWYSRGDYWGQGTQVTVSSGGGGSGGGSEVQLVESGGGLVQPGNSLRLSCAASGFTFSKFGMSWVRQAPGKGLEWVSSISGSGRDTLYADSVKGRFTISRDNAKTTLYLQMNSLRPEDTAVYYCTIGGSLSVSSQGTLVTVSSGGGGSGGGSEVQLVESGGGLVQPGGSLKLSCAASGFTFNKYAINWVRQAPGKGLEWVARIRSKYNNYATYYADQVKDRFTISRDDSKNTAYLQMNNLKTEDTAVYYCVRHANFGNSYISYWAYWGQGTLVTVSSGGGGSGGGGSGGGGSQTVVTQEPSLTVSPGGTVTLTCASSTGAVTSGNYPNWVQQKPGQAPRGLIGGTKFLVPGTPARFSGSLLGGKAALTLSGVQPEDEAEYYCTLWYSNRWVFGGGTKLTVLHHHHHH

SEQ ID NO: 3411 - protein, 513 aa, synthetic construct
  REGION 1..513: note = Description of Artificial Sequence: Synthetic polypeptide
QVQLQESGGGSVQAGGSLRLSCAFSGRTFSGFGTGWFRQAPEKEREFVAAISWDGGRTHYADSVKGRFTISRDNAKNTVYLQMDSLKPEDTAIYYCAAQVSRAYDGRWYSAVDYWGRGTQVTVSSGGGGSGGGSEVQLVESGGGLVQPGNSLRLSCAASGFTFSKFGMSWVRQAPGKGLEWVSSISGSGRDTLYADSVKGRFTISRDNAKTTLYLQMNSLRPEDTAVYYCTIGGSLSVSSQGTLVTVSSGGGGSGGGSEVQLVESGGGLVQPGGSLKLSCAASGFTFNKYAINWVRQAPGKGLEWVARIRSKYNNYATYYADQVKDRFTISRDDSKNTAYLQMNNLKTEDTAVYYCVRHANFGNSYISYWAYWGQGTLVTVSSGGGGSGGGGSGGGGSQTVVTQEPSLTVSPGGTVTLTCASSTGAVTSGNYPNWVQQKPGQAPRGLIGGTKFLVPGTPARFSGSLLGGKAALTLSGVQPEDEAEYYCTLWYSNRWVFGGGTKLTVLHHHHHH

SEQ ID NO: 3412 - protein, 513 aa, synthetic construct
  REGION 1..513: note = Description of Artificial Sequence: Synthetic polypeptide
QVQLQESGGGLVQAGGSLRLSCAVSGRTFSGFGTGWFRQAPGKEREFVAAISWSGGTTHYADSVKGRFTISRDNAKNTVYLQMNSLKPEDTAVYYCAGQVARAYDSSWYSRGDYWGQGTQVTVSSGGGGSGGGSEVQLVESGGGLVQPGNSLRLSCAASGFTFSKFGMSWVRQAPGKGLEWVSSISGSGRDTLYADSVKGRFTISRDNAKTTLYLQMNSLRPEDTAVYYCTIGGSLSVSSQGTLVTVSSGGGGSGGGSEVQLVESGGGLVQPGGSLKLSCAASGFTFNKYAINWVRQAPGKGLEWVARIRSKYNNYATYYADQVKDRFTISRDDSKNTAYLQMNNLKTEDTAVYYCVRHANFGNSYISYWAYWGQGTLVTVSSGGGGSGGGGSGGGGSQTVVTQEPSLTVSPGGTVTLTCASSTGAVTSGNYPNWVQQKPGQAPRGLIGGTKFLVPGTPARFSGSLLGGKAALTLSGVQPEDEAEYYCTLWYSNRWVFGGGTKLTVLHHHHHH

SEQ ID NO: 3413 - protein, 513 aa, synthetic construct
  REGION 1..513: note = Description of Artificial Sequence: Synthetic polypeptide
QVQLQESGGGLVQAGGSLGLSCAVSGRTFSGFGTGWFRQPPEKEREFVAAISWDGGRTHYADSVKGRFTISRDNAKNTVFLQMNSLKPEDTAVYYCAAQVARAYDSRWYSGGDYWGQGTQVTVSSGGGGSGGGSEVQLVESGGGLVQPGNSLRLSCAASGFTFSKFGMSWVRQAPGKGLEWVSSISGSGRDTLYADSVKGRFTISRDNAKTTLYLQMNSLRPEDTAVYYCTIGGSLSVSSQGTLVTVSSGGGGSGGGSEVQLVESGGGLVQPGGSLKLSCAASGFTFNKYAINWVRQAPGKGLEWVARIRSKYNNYATYYADQVKDRFTISRDDSKNTAYLQMNNLKTEDTAVYYCVRHANFGNSYISYWAYWGQGTLVTVSSGGGGSGGGGSGGGGSQTVVTQEPSLTVSPGGTVTLTCASSTGAVTSGNYPNWVQQKPGQAPRGLIGGTKFLVPGTPARFSGSLLGGKAALTLSGVQPEDEAEYYCTLWYSNRWVFGGGTKLTVLHHHHHH

SEQ ID NO: 3414 - protein, 516 aa, synthetic construct
  REGION 1..516: note = Description of Artificial Sequence: Synthetic polypeptide
QVQLQESGGGLVQAGGSLRLSCAVSGRTFSGFGTGWFRQAPGKEREFVAAISWSGGTTHYADSVKGRFTISRDNAKNTVSLVYLQMNSLKPDDTAVYYCAGQVARAYDSSWYSRGDYLGQGTQVTVSSGGGGSGGGSEVQLVESGGGLVQPGNSLRLSCAASGFTFSKFGMSWVRQAPGKGLEWVSSISGSGRDTLYADSVKGRFTISRDNAKTTLYLQMNSLRPEDTAVYYCTIGGSLSVSSQGTLVTVSSGGGGSGGGSEVQLVESGGGLVQPGGSLKLSCAASGFTFNKYAINWVRQAPGKGLEWVARIRSKYNNYATYYADQVKDRFTISRDDSKNTAYLQMNNLKTEDTAVYYCVRHANFGNSYISYWAYWGQGTLVTVSSGGGGSGGGGSGGGGSQTVVTQEPSLTVSPGGTVTLTCASSTGAVTSGNYPNWVQQKPGQAPRGLIGGTKFLVPGTPARFSGSLLGGKAALTLSGVQPEDEAEYYCTLWYSNRWVFGGGTKLTVLHHHHHH

SEQ ID NO: 3415 - protein, 513 aa, synthetic construct
  REGION 1..513: note = Description of Artificial Sequence: Synthetic polypeptide
QVQLQESGGGLVQAGGSLRLSCAVSGRTFSGFGTGWFRQAPGKEREFVAAISWDGGRTHYADSVKGRFTISRDNAANTVYLQMNSLKPEDTAVYYCAGQVSRAYDSMWYGRDDYWGQGTQVTVSSGGGGSGGGSEVQLVESGGGLVQPGNSLRLSCAASGFTFSKFGMSWVRQAPGKGLEWVSSISGSGRDTLYADSVKGRFTISRDNAKTTLYLQMNSLRPEDTAVYYCTIGGSLSVSSQGTLVTVSSGGGGSGGGSEVQLVESGGGLVQPGGSLKLSCAASGFTFNKYAINWVRQAPGKGLEWVARIRSKYNNYATYYADQVKDRFTISRDDSKNTAYLQMNNLKTEDTAVYYCVRHANFGNSYISYWAYWGQGTLVTVSSGGGGSGGGGSGGGGSQTVVTQEPSLTVSPGGTVTLTCASSTGAVTSGNYPNWVQQKPGQAPRGLIGGTKFLVPGTPARFSGSLLGGKAALTLSGVQPEDEAEYYCTLWYSNRWVFGGGTKLTVLHHHHHH

SEQ ID NO: 3416 - protein, 516 aa, synthetic construct
  REGION 1..516: note = Description of Artificial Sequence: Synthetic polypeptide
QVQLQESGGGLVQAGGSLRLSCAVSGRTFSGFGTGWFRQAPGKEREFVAAISWSGGTTHYADSVKGRFTISRDNAKNTVNLVYLQMNDLRPEDTAVYYCAGQVARAYDSNWYSRGDYWGQGTQVTVSSGGGGSGGGSEVQLVESGGGLVQPGNSLRLSCAASGFTFSKFGMSWVRQAPGKGLEWVSSISGSGRDTLYADSVKGRFTISRDNAKTTLYLQMNSLRPEDTAVYYCTIGGSLSVSSQGTLVTVSSGGGGSGGGSEVQLVESGGGLVQPGGSLKLSCAASGFTFNKYAINWVRQAPGKGLEWVARIRSKYNNYATYYADQVKDRFTISRDDSKNTAYLQMNNLKTEDTAVYYCVRHANFGNSYISYWAYWGQGTLVTVSSGGGGSGGGGSGGGGSQTVVTQEPSLTVSPGGTVTLTCASSTGAVTSGNYPNWVQQKPGQAPRGLIGGTKFLVPGTPARFSGSLLGGKAALTLSGVQPEDEAEYYCTLWYSNRWVFGGGTKLTVLHHHHHH

SEQ ID NO: 3417 - protein, 513 aa, synthetic construct
  REGION 1..513: note = Description of Artificial Sequence: Synthetic polypeptide
QVQLQESGGGLVQAGGSLRLSCAVSGRTFSGFGTGWFRQAPGKEREFVAAISWSGGTTHYADSVKGRFTISRDNAENTVYLEMNSLKPEDTAVYICAGQVSRAYDSNWYSRDDYWGQGTQVTVSSGGGGSGGGSEVQLVESGGGLVQPGNSLRLSCAASGFTFSKFGMSWVRQAPGKGLEWVSSISGSGRDTLYADSVKGRFTISRDNAKTTLYLQMNSLRPEDTAVYYCTIGGSLSVSSQGTLVTVSSGGGGSGGGSEVQLVESGGGLVQPGGSLKLSCAASGFTFNKYAINWVRQAPGKGLEWVARIRSKYNNYATYYADQVKDRFTISRDDSKNTAYLQMNNLKTEDTAVYYCVRHANFGNSYISYWAYWGQGTLVTVSSGGGGSGGGGSGGGGSQTVVTQEPSLTVSPGGTVTLTCASSTGAVTSGNYPNWVQQKPGQAPRGLIGGTKFLVPGTPARFSGSLLGGKAALTLSGVQPEDEAEYYCTLWYSNRWVFGGGTKLTVLHHHHHH

SEQ ID NO: 3418 - protein, 513 aa, synthetic construct
  REGION 1..513: note = Description of Artificial Sequence: Synthetic polypeptide
QVQLQESGGGLVQAGGSLRLSCAVSGRTFSGFGTGWFRQAPEKEREFVAAISWDGGRTHYADSVKGRFTISRDNAKNTVYLQMNSLKPEDTAIYYCAGQVARAYDTRWYSRGDYWGQGTQVTVSSGGGGSGGGSEVQLVESGGGLVQPGNSLRLSCAASGFTFSKFGMSWVRQAPGKGLEWVSSISGSGRDTLYADSVKGRFTISRDNAKTTLYLQMNSLRPEDTAVYYCTIGGSLSVSSQGTLVTVSSGGGGSGGGSEVQLVESGGGLVQPGGSLKLSCAASGFTFNKYAINWVRQAPGKGLEWVARIRSKYNNYATYYADQVKDRFTISRDDSKNTAYLQMNNLKTEDTAVYYCVRHANFGNSYISYWAYWGQGTLVTVSSGGGGSGGGGSGGGGSQTVVTQEPSLTVSPGGTVTLTCASSTGAVTSGNYPNWVQQKPGQAPRGLIGGTKFLVPGTPARFSGSLLGGKAALTLSGVQPEDEAEYYCTLWYSNRWVFGGGTKLTVLHHHHHH

SEQ ID NO: 3419 - protein, 513 aa, synthetic construct
  REGION 1..513: note = Description of Artificial Sequence: Synthetic polypeptide
QVQLQESGGGLVQAGGSLRLSCAVSGRTFSGFGTGWFRQAPGKEREFVAAISWDGGRTHYADFVKGRFTISRDNAKNTVYLQMNSLKPEDTAVYYCAAQVARAYDSRWYSGGDYWGQGTQVTVSSGGGGSGGGSEVQLVESGGGLVQPGNSLRLSCAASGFTFSKFGMSWVRQAPGKGLEWVSSISGSGRDTLYADSVKGRFTISRDNAKTTLYLQMNSLRPEDTAVYYCTIGGSLSVSSQGTLVTVSSGGGGSGGGSEVQLVESGGGLVQPGGSLKLSCAASGFTFNKYAINWVRQAPGKGLEWVARIRSKYNNYATYYADQVKDRFTISRDDSKNTAYLQMNNLKTEDTAVYYCVRHANFGNSYISYWAYWGQGTLVTVSSGGGGSGGGGSGGGGSQTVVTQEPSLTVSPGGTVTLTCASSTGAVTSGNYPNWVQQKPGQAPRGLIGGTKFLVPGTPARFSGSLLGGKAALTLSGVQPEDEAEYYCTLWYSNRWVFGGGTKLTVLHHHHHH

SEQ ID NO: 3420 - protein, 513 aa, synthetic construct
  REGION 1..513: note = Description of Artificial Sequence: Synthetic polypeptide
QVQLQESGGGLVQAGGSLRLSCAVSGRTFSGFGTGWFRQAPGKEREFVAAVSWSGGTTEIADSVKGRFTISRDNAKNTVYLQMSSLKPGDTAVYYCAGQVARAYDSRWYSRGDYWGQGTQVTVSSGGGGSGGGSEVQLVESGGGLVQPGNSLRLSCAASGFTFSKFGMSWVRQAPGKGLEWVSSISGSGRDTLYADSVKGRFTISRDNAKTTLYLQMNSLRPEDTAVYYCTIGGSLSVSSQGTLVTVSSGGGGSGGGSEVQLVESGGGLVQPGGSLKLSCAASGFTFNKYAINWVRQAPGKGLEWVARIRSKYNNYATYYADQVKDRFTISRDDSKNTAYLQMNNLKTEDTAVYYCVRHANFGNSYISYWAYWGQGTLVTVSSGGGGSGGGGSGGGGSQTVVTQEPSLTVSPGGTVTLTCASSTGAVTSGNYPNWVQQKPGQAPRGLIGGTKFLVPGTPARFSGSLLGGKAALTLSGVQPEDEAEYYCTLWYSNRWVFGGGTKLTVLHHHHHH

SEQ ID NO: 3421 - protein, 516 aa, synthetic construct
  REGION 1..516: note = Description of Artificial Sequence: Synthetic polypeptide
QVQLQESGGGLVQAGDSLRLSCAVSGRTFSGFGTGWFRQAPGKEREFVAAVSQSGGTTHYADSVKGRFTISRDNAKNTETLVYLQMNSLKPEDTAVYYCAGQVARAYDSSWYARGDYWGQGTQVTVSSGGGGSGGGSEVQLVESGGGLVQPGNSLRLSCAASGFTFSKFGMSWVRQAPGKGLEWVSSISGSGRDTLYADSVKGRFTISRDNAKTTLYLQMNSLRPEDTAVYYCTIGGSLSVSSQGTLVTVSSGGGGSGGGSEVQLVESGGGLVQPGGSLKLSCAASGFTFNKYAINWVRQAPGKGLEWVARIRSKYNNYATYYADQVKDRFTISRDDSKNTAYLQMNNLKTEDTAVYYCVRHANFGNSYISYWAYWGQGTLVTVSSGGGGSGGGGSGGGGSQTVVTQEPSLTVSPGGTVTLTCASSTGAVTSGNYPNWVQQKPGQAPRGLIGGTKFLVPGTPARFSGSLLGGKAALTLSGVQPEDEAEYYCTLWYSNRWVFGGGTKLTVLHHHHHH

SEQ ID NO: 3422 - protein, 516 aa, synthetic construct
  REGION 1..516: note = Description of Artificial Sequence: Synthetic polypeptide
QVQLQESGGGLVQAGGSLRLSCAVSGRTFSGFGTGWFRQAPGKEREFVAAISWSGGTTHYADSVKGRFTISRDNAKNTVNLVYLQMNSLRPEDTAVYYCAGQVARAYDSNWYSRGDYWGQGTQVTVSSGGGGSGGGSEVQLVESGGGLVQPGNSLRLSCAASGFTFSKFGMSWVRQAPGKGLEWVSSISGSGRDTLYADSVKGRFTISRDNAKTTLYLQMNSLRPEDTAVYYCTIGGSLSVSSQGTLVTVSSGGGGSGGGSEVQLVESGGGLVQPGGSLKLSCAASGFTFNKYAINWVRQAPGKGLEWVARIRSKYNNYATYYADQVKDRFTISRDDSKNTAYLQMNNLKTEDTAVYYCVRHANFGNSYISYWAYWGQGTLVTVSSGGGGSGGGGSGGGGSQTVVTQEPSLTVSPGGTVTLTCASSTGAVTSGNYPNWVQQKPGQAPRGLIGGTKFLVPGTPARFSGSLLGGKAALTLSGVQPEDEAEYYCTLWYSNRWVFGGGTKLTVLHHHHHH

SEQ ID NO: 3423 - protein, 513 aa, synthetic construct
  REGION 1..513: note = Description of Artificial Sequence: Synthetic polypeptide
QVQLQESGGGLVQAGGSLRLSCRFSGRTFSGFGTGWFRQAPGKEREFVAAISWAGGRTHYEDSVKGRFTISRDNAKNTVYLQMNSLKPEDTAVYYCAVQVSRAYDGIWYSGGDYWGQGTQVTVSSGGGGSGGGSEVQLVESGGGLVQPGNSLRLSCAASGFTFSKFGMSWVRQAPGKGLEWVSSISGSGRDTLYADSVKGRFTISRDNAKTTLYLQMNSLRPEDTAVYYCTIGGSLSVSSQGTLVTVSSGGGGSGGGSEVQLVESGGGLVQPGGSLKLSCAASGFTFNKYAINWVRQAPGKGLEWVARIRSKYNNYATYYADQVKDRFTISRDDSKNTAYLQMNNLKTEDTAVYYCVRHANFGNSYISYWAYWGQGTLVTVSSGGGGSGGGGSGGGGSQTVVTQEPSLTVSPGGTVTLTCASSTGAVTSGNYPNWVQQKPGQAPRGLIGGTKFLVPGTPARFSGSLLGGKAALTLSGVQPEDEAEYYCTLWYSNRWVFGGGTKLTVLHHHHHH

SEQ ID NO: 3424 - protein, 515 aa, synthetic construct
  REGION 1..515: note = Description of Artificial Sequence: Synthetic polypeptide
QVQLQESGGGLVQAGGSLMVSCAASGGTWSSYATGWFRQVPGKERKLIAGISRSGGRTYYAESVKGRFTISRDNAKNTVYLQMNTLKPDDTAVYYCAAARYFTSSVVYTSGNDYDYWGQGTQVTVSSGGGGSGGGSEVQLVESGGGLVQPGNSLRLSCAASGFTFSKFGMSWVRQAPGKGLEWVSSISGSGRDTLYADSVKGRFTISRDNAKTTLYLQMNSLRPEDTAVYYCTIGGSLSVSSQGTLVTVSSGGGGSGGGSEVQLVESGGGLVQPGGSLKLSCAASGFTFNKYAINWVRQAPGKGLEWVARIRSKYNNYATYYADQVKDRFTISRDDSKNTAYLQMNNLKTEDTAVYYCVRHANFGNSYISYWAYWGQGTLVTVSSGGGGSGGGGSGGGGSQTVVTQEPSLTVSPGGTVTLTCASSTGAVTSGNYPNWVQQKPGQAPRGLIGGTKFLVPGTPARFSGSLLGGKAALTLSGVQPEDEAEYYCTLWYSNRWVFGGGTKLTVLHHHHHH

SEQ ID NO: 3425 - protein, 515 aa, synthetic construct
  REGION 1..515: note = Description of Artificial Sequence: Synthetic polypeptide
QVQLQESGGGLVQAGGSLMVSCAASGGTWSSYATGWFRQVPGKERELIAGISRSGGRTYYAESVKGRFTISRDNAKNTVYLQMNTLKPDDTAVYYCAAARYFTSSVVYTSGNDYDYWGQGTQVTVSSGGGGSGGGSEVQLVESGGGLVQPGNSLRLSCAASGFTFSKFGMSWVRQAPGKGLEWVSSISGSGRDTLYADSVKGRFTISRDNAKTTLYLQMNSLRPEDTAVYYCTIGGSLSVSSQGTLVTVSSGGGGSGGGSEVQLVESGGGLVQPGGSLKLSCAASGFTFNKYAINWVRQAPGKGLEWVARIRSKYNNYATYYADQVKDRFTISRDDSKNTAYLQMNNLKTEDTAVYYCVRHANFGNSYISYWAYWGQGTLVTVSSGGGGSGGGGSGGGGSQTVVTQEPSLTVSPGGTVTLTCASSTGAVTSGNYPNWVQQKPGQAPRGLIGGTKFLVPGTPARFSGSLLGGKAALTLSGVQPEDEAEYYCTLWYSNRWVFGGGTKLTVLHHHHHH

SEQ ID NO: 3426 - protein, 514 aa, synthetic construct
  REGION 1..514: note = Description of Artificial Sequence: Synthetic polypeptide
QVQLQESGGGLVQPGGSLRLSCAASGGTFSSYATGWFRQVPGKEREFIAGISRNSGRTYAESVKGRFTISRDNAKNTVYLQMNTLRPDDTAVYYCAAARYFTRDAIYTSGDDYDYWGQGTQVTASSGGGGSGGGSEVQLVESGGGLVQPGNSLRLSCAASGFTFSKFGMSWVRQAPGKGLEWVSSISGSGRDTLYADSVKGRFTISRDNAKTTLYLQMNSLRPEDTAVYYCTIGGSLSVSSQGTLVTVSSGGGGSGGGSEVQLVESGGGLVQPGGSLKLSCAASGFTFNKYAINWVRQAPGKGLEWVARIRSKYNNYATYYADQVKDRFTISRDDSKNTAYLQMNNLKTEDTAVYYCVRHANFGNSYISYWAYWGQGTLVTVSSGGGGSGGGGSGGGGSQTVVTQEPSLTVSPGGTVTLTCASSTGAVTSGNYPNWVQQKPGQAPRGLIGGTKFLVPGTPARFSGSLLGGKAALTLSGVQPEDEAEYYCTLWYSNRWVFGGGTKLTVLHHHHHH

SEQ ID NO: 3427 - protein, 515 aa, synthetic construct
  REGION 1..515: note = Description of Artificial Sequence: Synthetic polypeptide
QVQLQESGGGLVQVGGSLMVSCAASGGTFSSYATGWFRQVPGKEREFIAGVSRNSGRTYYAESVKGRFTISRDNAKNTVYLQMNTLKPDDTGVYYCAAARYFTRDAVYTSGDDYDYWGQGTQVTVSSGGGGSGGGSEVQLVESGGGLVQPGNSLRLSCAASGFTFSKFGMSWVRQAPGKGLEWVSSISGSGRDTLYADSVKGRFTISRDNAKTTLYLQMNSLRPEDTAVYYCTIGGSLSVSSQGTLVTVSSGGGGSGGGSEVQLVESGGGLVQPGGSLKLSCAASGFTFNKYAINWVRQAPGKGLEWVARIRSKYNNYATYYADQVKDRFTISRDDSKNTAYLQMNNLKTEDTAVYYCVRHANFGNSYISYWAYWGQGTLVTVSSGGGGSGGGGSGGGGSQTVVTQEPSLTVSPGGTVTLTCASSTGAVTSGNYPNWVQQKPGQAPRGLIGGTKFLVPGTPARFSGSLLGGKAALTLSGVQPEDEAEYYCTLWYSNRWVFGGGTKLTVLHHHHHH

SEQ ID NO: 3428 - protein, 515 aa, synthetic construct
  REGION 1..515: note = Description of Artificial Sequence: Synthetic polypeptide
QVQLQESGGGLVQLGDSLMVSCAASGGTFSSYATGWFRQVPGREREFIAGISRSGGRTYYAESVKGRFTISRDNAKNTVYLQMNTLKPDDTAVYYCAAARYFTTSVVYTSGDDYDYWGQGTQVTVSSGGGGSGGGSEVQLVESGGGLVQPGNSLRLSCAASGFTFSKFGMSWVRQAPGKGLEWVSSISGSGRDTLYADSVKGRFTISRDNAKTTLYLQMNSLRPEDTAVYYCTIGGSLSVSSQGTLVTVSSGGGGSGGGSEVQLVESGGGLVQPGGSLKLSCAASGFTFNKYAINWVRQAPGKGLEWVARIRSKYNNYATYYADQVKDRFTISRDDSKNTAYLQMNNLKTEDTAVYYCVRHANFGNSYISYWAYWGQGTLVTVSSGGGGSGGGGSGGGGSQTVVTQEPSLTVSPGGTVTLTCASSTGAVTSGNYPNWVQQKPGQAPRGLIGGTKFLVPGTPARFSGSLLGGKAALTLSGVQPEDEAEYYCTLWYSNRWVFGGGTKLTVLHHHHHH

SEQ ID NO: 3429 - protein, 515 aa, synthetic construct
  REGION 1..515: note = Description of Artificial Sequence: Synthetic polypeptide
QVQLQESGGGLVQLGDSLMVSCAASGGTFSSYATGWFRQVPGKEREFIAGISRSGGRTYYAESVKGRFTISRDNAKNTVYLQMNTLKPDDTAVYYCAAARYFTTSVVYTSGDDYDYWGQGTQVTVSSGGGGSGGGSEVQLVESGGGLVQPGNSLRLSCAASGFTFSKFGMSWVRQAPGKGLEWVSSISGSGRDTLYADSVKGRFTISRDNAKTTLYLQMNSLRPEDTAVYYCTIGGSLSVSSQGTLVTVSSGGGGSGGGSEVQLVESGGGLVQPGGSLKLSCAASGFTFNKYAINWVRQAPGKGLEWVARIRSKYNNYATYYADQVKDRFTISRDDSKNTAYLQMNNLKTEDTAVYYCVRHANFGNSYISYWAYWGQGTLVTVSSGGGGSGGGGSGGGGSQTVVTQEPSLTVSPGGTVTLTCASSTGAVTSGNYPNWVQQKPGQAPRGLIGGTKFLVPGTPARFSGSLLGGKAALTLSGVQPEDEAEYYCTLWYSNRWVFGGGTKLTVLHHHHHH

SEQ ID NO: 3430 - protein, 515 aa, synthetic construct
  REGION 1..515: note = Description of Artificial Sequence: Synthetic polypeptide
QVQLQESGGGLVQAGGSLMVSCAASGGTWSSYATGWFRQVPGKERELIAGISRSGGRTYYAESVKGRFTISRDNAKNTVYLQMNTLKSDDTAVYYCAAARYFTSSVVYTSGNDYDYWGQGTQVTVSSGGGGSGGGSEVQLVESGGGLVQPGNSLRLSCAASGFTFSKFGMSWVRQAPGKGLEWVSSISGSGRDTLYADSVKGRFTISRDNAKTTLYLQMNSLRPEDTAVYYCTIGGSLSVSSQGTLVTVSSGGGGSGGGSEVQLVESGGGLVQPGGSLKLSCAASGFTFNKYAINWVRQAPGKGLEWVARIRSKYNNYATYYADQVKDRFTISRDDSKNTAYLQMNNLKTEDTAVYYCVRHANFGNSYISYWAYWGQGTLVTVSSGGGGSGGGGSGGGGSQTVVTQEPSLTVSPGGTVTLTCASSTGAVTSGNYPNWVQQKPGQAPRGLIGGTKFLVPGTPARFSGSLLGGKAALTLSGVQPEDEAEYYCTLWYSNRWVFGGGTKLTVLHHHHHH

SEQ ID NO: 3431 - protein, 515 aa, synthetic construct
  REGION 1..515: note = Description of Artificial Sequence: Synthetic polypeptide
QVQLQESGGGLVQVGGSLMVSCAASGGTFSSYATGWFRQVPGKEREFIAGISRNSGRTYYAESVKGRFTISRDNAKNTVYLQMNTLKPDDTAVYYCAAARYFTRDAVYTSGDDYDYWGQGTQVTVSSGGGGSGGGSEVQLVESGGGLVQPGNSLRLSCAASGFTFSKFGMSWVRQAPGKGLEWVSSISGSGRDTLYADSVKGRFTISRDNAKTTLYLQMNSLRPEDTAVYYCTIGGSLSVSSQGTLVTVSSGGGGSGGGSEVQLVESGGGLVQPGGSLKLSCAASGFTFNKYAINWVRQAPGKGLEWVARIRSKYNNYATYYADQVKDRFTISRDDSKNTAYLQMNNLKTEDTAVYYCVRHANFGNSYISYWAYWGQGTLVTVSSGGGGSGGGGSGGGGSQTVVTQEPSLTVSPGGTVTLTCASSTGAVTSGNYPNWVQQKPGQAPRGLIGGTKFLVPGTPARFSGSLLGGKAALTLSGVQPEDEAEYYCTLWYSNRWVFGGGTKLTVLHHHHHH

SEQ ID NO: 3432 - protein, 515 aa, synthetic construct
  REGION 1..515: note = Description of Artificial Sequence: Synthetic polypeptide
QVQLQESGGGLVQVGGSLMVSCAASGGTFSSYATGWFRQVPGKEREFIAGISRNSGRTYYAESVKGRFTISRDNAKNTVYLQMNTLKPDDTAVYYCAAARYFTRDVVYTSGDDYDYWGQGTQVTVSSGGGGSGGGSEVQLVESGGGLVQPGNSLRLSCAASGFTFSKFGMSWVRQAPGKGLEWVSSISGSGRDTLYADSVKGRFTISRDNAKTTLYLQMNSLRPEDTAVYYCTIGGSLSVSSQGTLVTVSSGGGGSGGGSEVQLVESGGGLVQPGGSLKLSCAASGFTFNKYAINWVRQAPGKGLEWVARIRSKYNNYATYYADQVKDRFTISRDDSKNTAYLQMNNLKTEDTAVYYCVRHANFGNSYISYWAYWGQGTLVTVSSGGGGSGGGGSGGGGSQTVVTQEPSLTVSPGGTVTLTCASSTGAVTSGNYPNWVQQKPGQAPRGLIGGTKFLVPGTPARFSGSLLGGKAALTLSGVQPEDEAEYYCTLWYSNRWVFGGGTKLTVLHHHHHH

SEQ ID NO: 3433 - protein, 515 aa, synthetic construct
  REGION 1..515: note = Description of Artificial Sequence: Synthetic polypeptide
QVQLQESGGGLVQAGGSLMVSCAASGGTFSSYATGWFRQVPGKEREFIAGISRSGGRTYYAESVKGRFTISRDNAKNTVYLQMNTLKPDDTAVYYCAAARYFTTSVVYTSGDDYDYWGQGTQVTVSSGGGGSGGGSEVQLVESGGGLVQPGNSLRLSCAASGFTFSKFGMSWVRQAPGKGLEWVSSISGSGRDTLYADSVKGRFTISRDNAKTTLYLQMNSLRPEDTAVYYCTIGGSLSVSSQGTLVTVSSGGGGSGGGSEVQLVESGGGLVQPGGSLKLSCAASGFTFNKYAINWVRQAPGKGLEWVARIRSKYNNYATYYADQVKDRFTISRDDSKNTAYLQMNNLKTEDTAVYYCVRHANFGNSYISYWAYWGQGTLVTVSSGGGGSGGGGSGGGGSQTVVTQEPSLTVSPGGTVTLTCASSTGAVTSGNYPNWVQQKPGQAPRGLIGGTKFLVPGTPARFSGSLLGGKAALTLSGVQPEDEAEYYCTLWYSNRWVFGGGTKLTVLHHHHHH

SEQ ID NO: 3434 - protein, 513 aa, synthetic construct
  REGION 1..513: note = Description of Artificial Sequence: Synthetic polypeptide
QVQLQESGGGLVQAGGSLRLSCAASGRTFSSYAMGWFRQAPGKEREFVAAISWSGSNTYYADSVKGRFTISRDNAKNTVYLQMDSLKPEDTAVYYCAAGGSTRVVVTTTPVVKYWGQGTQVTVSSGGGGSGGGSEVQLVESGGGLVQPGNSLRLSCAASGFTFSKFGMSWVRQAPGKGLEWVSSISGSGRDTLYADSVKGRFTISRDNAKTTLYLQMNSLRPEDTAVYYCTIGGSLSVSSQGTLVTVSSGGGGSGGGSEVQLVESGGGLVQPGGSLKLSCAASGFTFNKYAINWVRQAPGKGLEWVARIRSKYNNYATYYADQVKDRFTISRDDSKNTAYLQMNNLKTEDTAVYYCVRHANFGNSYISYWAYWGQGTLVTVSSGGGGSGGGGSGGGGSQTVVTQEPSLTVSPGGTVTLTCASSTGAVTSGNYPNWVQQKPGQAPRGLIGGTKFLVPGTPARFSGSLLGGKAALTLSGVQPEDEAEYYCTLWYSNRWVFGGGTKLTVLHHHHHH

SEQ ID NO: 3435 - protein, 513 aa, synthetic construct
  REGION 1..513: note = Description of Artificial Sequence: Synthetic polypeptide
QVQLQESGGGLVQAGGSLRLSCAASGRTFSSYAMGWFRQAPGMEREFVAAISWSGYSTYYADSVKGRFTISRDDAKNTVYLQMDSLKPEDTAVYYCAAGGSTRVVVTTTPVVKYWGQGTQVTVSSGGGGSGGGSEVQLVESGGGLVQPGNSLRLSCAASGFTFSKFGMSWVRQAPGKGLEWVSSISGSGRDTLYADSVKGRFTISRDNAKTTLYLQMNSLRPEDTAVYYCTIGGSLSVSSQGTLVTVSSGGGGSGGGSEVQLVESGGGLVQPGGSLKLSCAASGFTFNKYAINWVRQAPGKGLEWVARIRSKYNNYATYYADQVKDRFTISRDDSKNTAYLQMNNLKTEDTAVYYCVRHANFGNSYISYWAYWGQGTLVTVSSGGGGSGGGGSGGGGSQTVVTQEPSLTVSPGGTVTLTCASSTGAVTSGNYPNWVQQKPGQAPRGLIGGTKFLVPGTPARFSGSLLGGKAALTLSGVQPEDEAEYYCTLWYSNRWVFGGGTKLTVLHHHHHH

SEQ ID NO: 3436 - protein, 513 aa, synthetic construct
  REGION 1..513: note = Description of Artificial Sequence: Synthetic polypeptide
QVQLQESGGGLVQAGGSLRLSCAASGRTFSSYALGWFRQAPGKEREFVAAISWSGGNTYYADSVKGRFTISRDDAKNTVYLQMDSLKPEDTAVYYCAAGGSTRVVVTTTPVVKYWGQGTQVTVSSGGGGSGGGSEVQLVESGGGLVQPGNSLRLSCAASGFTFSKFGMSWVRQAPGKGLEWVSSISGSGRDTLYADSVKGRFTISRDNAKTTLYLQMNSLRPEDTAVYYCTIGGSLSVSSQGTLVTVSSGGGGSGGGSEVQLVESGGGLVQPGGSLKLSCAASGFTFNKYAINWVRQAPGKGLEWVARIRSKYNNYATYYADQVKDRFTISRDDSKNTAYLQMNNLKTEDTAVYYCVRHANFGNSYISYWAYWGQGTLVTVSSGGGGSGGGGSGGGGSQTVVTQEPSLTVSPGGTVTLTCASSTGAVTSGNYPNWVQQKPGQAPRGLIGGTKFLVPGTPARFSGSLLGGKAALTLSGVQPEDEAEYYCTLWYSNRWVFGGGTKLTVLHHHHHH

SEQ ID NO: 3437 - protein, 513 aa, synthetic construct
  REGION 1..513: note = Description of Artificial Sequence: Synthetic polypeptide
QVQLQESGGGLVQAGGSLRLSCAASERTFSSYTMGWFRQAPGKEREFVAAMSWSGGSTYYADSVKGRFTISRDNAKNTVYLQMDSLKPEDTAVYYCAAGGSTRVVVTTTPVVKYWGQGTQVTVSSGGGGSGGGSEVQLVESGGGLVQPGNSLRLSCAASGFTFSKFGMSWVRQAPGKGLEWVSSISGSGRDTLYADSVKGRFTISRDNAKTTLYLQMNSLRPEDTAVYYCTIGGSLSVSSQGTLVTVSSGGGGSGGGSEVQLVESGGGLVQPGGSLKLSCAASGFTFNKYAINWVRQAPGKGLEWVARIRSKYNNYATYYADQVKDRFTISRDDSKNTAYLQMNNLKTEDTAVYYCVRHANFGNSYISYWAYWGQGTLVTVSSGGGGSGGGGSGGGGSQTVVTQEPSLTVSPGGTVTLTCASSTGAVTSGNYPNWVQQKPGQAPRGLIGGTKFLVPGTPARFSGSLLGGKAALTLSGVQPEDEAEYYCTLWYSNRWVFGGGTKLTVLHHHHHH

SEQ ID NO: 3438 - protein, 513 aa, synthetic construct
  REGION 1..513: note = Description of Artificial Sequence: Synthetic polypeptide
QVQLQESGGGLVQAGGSLRLSCAASERTFSSYAMGWFRQAPGKEREFVAAISWSGGSTYYADSVKGRFTISRDNAKNTVYLQMDSLKPEDTAVYYCAAGGSTRVVVTTTPIVKYWGQGTQVTVSSGGGGSGGGSEVQLVESGGGLVQPGNSLRLSCAASGFTFSKFGMSWVRQAPGKGLEWVSSISGSGRDTLYADSVKGRFTISRDNAKTTLYLQMNSLRPEDTAVYYCTIGGSLSVSSQGTLVTVSSGGGGSGGGSEVQLVESGGGLVQPGGSLKLSCAASGFTFNKYAINWVRQAPGKGLEWVARIRSKYNNYATYYADQVKDRFTISRDDSKNTAYLQMNNLKTEDTAVYYCVRHANFGNSYISYWAYWGQGTLVTVSSGGGGSGGGGSGGGGSQTVVTQEPSLTVSPGGTVTLTCASSTGAVTSGNYPNWVQQKPGQAPRGLIGGTKFLVPGTPARFSGSLLGGKAALTLSGVQPEDEAEYYCTLWYSNRWVFGGGTKLTVLHHHHHH

SEQ ID NO: 3439 - protein, 513 aa, synthetic construct
  REGION 1..513: note = Description of Artificial Sequence: Synthetic polypeptide
QVQLQESGGGWVQAGGSLRLSCAASGRTFSSYAMGWFRQAPGKEREFVAAISWSGSSTYYADSVKGRFTISRDNAKNTVYLLMDSLKPEDTAVYYCAAGGSTRVVVTTTPVVKYWGQGTQVTVSSGGGGSGGGSEVQLVESGGGLVQPGNSLRLSCAASGFTFSKFGMSWVRQAPGKGLEWVSSISGSGRDTLYADSVKGRFTISRDNAKTTLYLQMNSLRPEDTAVYYCTIGGSLSVSSQGTLVTVSSGGGGSGGGSEVQLVESGGGLVQPGGSLKLSCAASGFTFNKYAINWVRQAPGKGLEWVARIRSKYNNYATYYADQVKDRFTISRDDSKNTAYLQMNNLKTEDTAVYYCVRHANFGNSYISYWAYWGQGTLVTVSSGGGGSGGGGSGGGGSQTVVTQEPSLTVSPGGTVTLTCASSTGAVTSGNYPNWVQQKPGQAPRGLIGGTKFLVPGTPARFSGSLLGGKAALTLSGVQPEDEAEYYCTLWYSNRWVFGGGTKLTVLHHHHHH

SEQ ID NO: 3440 - protein, 509 aa, synthetic construct
  REGION 1..509: note = Description of Artificial Sequence: Synthetic polypeptide
QVQLQESGGGLVQAGGSLRLSCAASGRTFSTLTVAWFRQAPGKEREFVVASIPSGSNTGYAESVKGRFTISRDIAKNTVYLQMNSLKPEDTAMYFCAARIYFGSSRGYDYWGQGTQVTVSSGGGGSGGGSEVQLVESGGGLVQPGNSLRLSCAASGFTFSKFGMSWVRQAPGKGLEWVSSISGSGRDTLYADSVKGRFTISRDNAKTTLYLQMNSLRPEDTAVYYCTIGGSLSVSSQGTLVTVSSGGGGSGGGSEVQLVESGGGLVQPGGSLKLSCAASGFTFNKYAINWVRQAPGKGLEWVARIRSKYNNYATYYADQVKDRFTISRDDSKNTAYLQMNNLKTEDTAVYYCVRHANFGNSYISYWAYWGQGTLVTVSSGGGGSGGGGSGGGGSQTVVTQEPSLTVSPGGTVTLTCASSTGAVTSGNYPNWVQQKPGQAPRGLIGGTKFLVPGTPARFSGSLLGGKAALTLSGVQPEDEAEYYCTLWYSNRWVFGGGTKLTVLHHHHHH

SEQ ID NO: 3441 - protein, 509 aa, synthetic construct
  REGION 1..509: note = Description of Artificial Sequence: Synthetic polypeptide
QVQLQESGGGLVQAGGSLRLSCAASGRTFTTYTVAWFRQAPGKEREFLVASIPTGSNTAYAESVKGRFTISRGNAKNTVYLQMNSLKPEDTAMYYCAARTYFGSSRGYDYWGQGTQVTVSSGGGGSGGGSEVQLVESGGGLVQPGNSLRLSCAASGFTFSKFGMSWVRQAPGKGLEWVSSISGSGRDTLYADSVKGRFTISRDNAKTTLYLQMNSLRPEDTAVYYCTIGGSLSVSSQGTLVTVSSGGGGSGGGSEVQLVESGGGLVQPGGSLKLSCAASGFTFNKYAINWVRQAPGKGLEWVARIRSKYNNYATYYADQVKDRFTISRDDSKNTAYLQMNNLKTEDTAVYYCVRHANFGNSYISYWAYWGQGTLVTVSSGGGGSGGGGSGGGGSQTVVTQEPSLTVSPGGTVTLTCASSTGAVTSGNYPNWVQQKPGQAPRGLIGGTKFLVPGTPARFSGSLLGGKAALTLSGVQPEDEAEYYCTLWYSNRWVFGGGTKLTVLHHHHHH

SEQ ID NO: 3442 - protein, 513 aa, synthetic construct
  REGION 1..513: note = Description of Artificial Sequence: Synthetic polypeptide
QVQLQESGGGLVQAGDSLRLSCATSGRTFNLYRVGWFRQAPGKEREFVARITWSADITQYADSVKGRFTISRDNAKNTVYLQMNSLKPEDTAIYYCATTLRKSSGIYHVDDYDDWGQGTQVTVSSGGGGSGGGSEVQLVESGGGLVQPGNSLRLSCAASGFTFSKFGMSWVRQAPGKGLEWVSSISGSGRDTLYADSVKGRFTISRDNAKTTLYLQMNSLRPEDTAVYYCTIGGSLSVSSQGTLVTVSSGGGGSGGGSEVQLVESGGGLVQPGGSLKLSCAASGFTFNKYAINWVRQAPGKGLEWVARIRSKYNNYATYYADQVKDRFTISRDDSKNTAYLQMNNLKTEDTAVYYCVRHANFGNSYISYWAYWGQGTLVTVSSGGGGSGGGGSGGGGSQTVVTQEPSLTVSPGGTVTLTCASSTGAVTSGNYPNWVQQKPGQAPRGLIGGTKFLVPGTPARFSGSLLGGKAALTLSGVQPEDEAEYYCTLWYSNRWVFGGGTKLTVLHHHHHH

SEQ ID NO: 3443 - protein, 513 aa, synthetic construct
  REGION 1..513: note = Description of Artificial Sequence: Synthetic polypeptide
QVQLQESGGGLVQAGGSLRLSCATSGRTFNLYRVGWFRQAPGKEREFVARITWSADITQYTDSVKGRFTISRDNAKNTVYLQMNSLKPEDTAIYYCATTLRKSSGIYHTDDYDYWGQGTQVTVSSGGGGSGGGSEVQLVESGGGLVQPGNSLRLSCAASGFTFSKFGMSWVRQAPGKGLEWVSSISGSGRDTLYADSVKGRFTISRDNAKTTLYLQMNSLRPEDTAVYYCTIGGSLSVSSQGTLVTVSSGGGGSGGGSEVQLVESGGGLVQPGGSLKLSCAASGFTFNKYAINWVRQAPGKGLEWVARIRSKYNNYATYYADQVKDRFTISRDDSKNTAYLQMNNLKTEDTAVYYCVRHANFGNSYISYWAYWGQGTLVTVSSGGGGSGGGGSGGGGSQTVVTQEPSLTVSPGGTVTLTCASSTGAVTSGNYPNWVQQKPGQAPRGLIGGTKFLVPGTPARFSGSLLGGKAALTLSGVQPEDEAEYYCTLWYSNRWVFGGGTKLTVLHHHHHH

SEQ ID NO: 3444 - protein, 510 aa, synthetic construct
  REGION 1..510: note = Description of Artificial Sequence: Synthetic polypeptide
QVQLQESGGGLVQPGGSLRLSCAASGFTFSDYAMSWVRQAPGKGLEWVSGISSGGYKIGYTDSTKGRFTISRDNAKNTLYLQMNSLTAEDTAVYYCAKGTQWSWSLRDNTSRGQGTQVTVSSGGGGSGGGSEVQLVESGGGLVQPGNSLRLSCAASGFTFSKFGMSWVRQAPGKGLEWVSSISGSGRDTLYADSVKGRFTISRDNAKTTLYLQMNSLRPEDTAVYYCTIGGSLSVSSQGTLVTVSSGGGGSGGGSEVQLVESGGGLVQPGGSLKLSCAASGFTFNKYAINWVRQAPGKGLEWVARIRSKYNNYATYYADQVKDRFTISRDDSKNTAYLQMNNLKTEDTAVYYCVRHANFGNSYISYWAYWGQGTLVTVSSGGGGSGGGGSGGGGSQTVVTQEPSLTVSPGGTVTLTCASSTGAVTSGNYPNWVQQKPGQAPRGLIGGTKFLVPGTPARFSGSLLGGKAALTLSGVQPEDEAEYYCTLWYSNRWVFGGGTKLTVLHHHHHH

SEQ ID NO: 3445 - protein, 510 aa, synthetic construct
  REGION 1..510: note = Description of Artificial Sequence: Synthetic polypeptide
QVQLQESGGGLVQPGGSLRLSCKASGFTFSSYAMSWVRQAPGKGLEWVSGISSGGYKIGYTDSTKGRFTISRDNAKNTLYLQMNSLNAEDTAVYYCAKGTQWSWALRDSTSRGQGTQVTVSSGGGGSGGGSEVQLVESGGGLVQPGNSLRLSCAASGFTFSKFGMSWVRQAPGKGLEWVSSISGSGRDTLYADSVKGRFTISRDNAKTTLYLQMNSLRPEDTAVYYCTIGGSLSVSSQGTLVTVSSGGGGSGGGSEVQLVESGGGLVQPGGSLKLSCAASGFTFNKYAINWVRQAPGKGLEWVARIRSKYNNYATYYADQVKDRFTISRDDSKNTAYLQMNNLKTEDTAVYYCVRHANFGNSYISYWAYWGQGTLVTVSSGGGGSGGGGSGGGGSQTVVTQEPSLTVSPGGTVTLTCASSTGAVTSGNYPNWVQQKPGQAPRGLIGGTKFLVPGTPARFSGSLLGGKAALTLSGVQPEDEAEYYCTLWYSNRWVFGGGTKLTVLHHHHHH

SEQ ID NO: 3446 - protein, 499 aa, synthetic construct
  REGION 1..499: note = Description of Artificial Sequence: Synthetic polypeptide
QVQLQESGGGLVQAGGSLTLSCTASGSTFSINHFSWYRQAPGKQRELVAFISSDGVSIDVESVKGRFTISGDNDKNTAYLQMNGLKPEDTAVYYCYYRGFWGQGTQVTVSSGGGGSGGGSEVQLVESGGGLVQPGNSLRLSCAASGFTFSKFGMSWVRQAPGKGLEWVSSISGSGRDTLYADSVKGRFTISRDNAKTTLYLQMNSLRPEDTAVYYCTIGGSLSVSSQGTLVTVSSGGGGSGGGSEVQLVESGGGLVQPGGSLKLSCAASGFTFNKYAINWVRQAPGKGLEWVARIRSKYNNYATYYADQVKDRFTISRDDSKNTAYLQMNNLKTEDTAVYYCVRHANFGNSYISYWAYWGQGTLVTVSSGGGGSGGGGSGGGGSQTVVTQEPSLTVSPGGTVTLTCASSTGAVTSGNYPNWVQQKPGQAPRGLIGGTKFLVPGTPARFSGSLLGGKAALTLSGVQPEDEAEYYCTLWYSNRWVFGGGTKLTVLHHHHHH

SEQ ID NO: 3447 - protein, 499 aa, synthetic construct
  REGION 1..499: note = Description of Artificial Sequence: Synthetic polypeptide
QVQLQESGGGLVQPGGSLTLSCTASGSTFSINHFAWYRQAPGKQRELVAFISSDGRSTDVESVKGRFTISGDNDKNTAYLQMNGLKPEDTAVYYCYYRGSWGQGTQVTVSSGGGGSGGGSEVQLVESGGGLVQPGNSLRLSCAASGFTFSKFGMSWVRQAPGKGLEWVSSISGSGRDTLYADSVKGRFTISRDNAKTTLYLQMNSLRPEDTAVYYCTIGGSLSVSSQGTLVTVSSGGGGSGGGSEVQLVESGGGLVQPGGSLKLSCAASGFTFNKYAINWVRQAPGKGLEWVARIRSKYNNYATYYADQVKDRFTISRDDSKNTAYLQMNNLKTEDTAVYYCVRHANFGNSYISYWAYWGQGTLVTVSSGGGGSGGGGSGGGGSQTVVTQEPSLTVSPGGTVTLTCASSTGAVTSGNYPNWVQQKPGQAPRGLIGGTKFLVPGTPARFSGSLLGGKAALTLSGVQPEDEAEYYCTLWYSNRWVFGGGTKLTVLHHHHHH

SEQ ID NO: 3448 - protein, 515 aa, synthetic construct
  REGION 1..515: note = Description of Artificial Sequence: Synthetic polypeptide
QVQLQESGGGLVQAGGSLSLSCAASEGTISHAAMGWFRQAPGKERQFVAYDTWTGGSTNYADSVKDRFTITGDHAKNTVYLQMNSLKPEDTGVYYCAVRGRYSASYTYTNPASYKYWGQGTQVTVSSGGGGSGGGSEVQLVESGGGLVQPGNSLRLSCAASGFTFSKFGMSWVRQAPGKGLEWVSSISGSGRDTLYADSVKGRFTISRDNAKTTLYLQMNSLRPEDTAVYYCTIGGSLSVSSQGTLVTVSSGGGGSGGGSEVQLVESGGGLVQPGGSLKLSCAASGFTFNKYAINWVRQAPGKGLEWVARIRSKYNNYATYYADQVKDRFTISRDDSKNTAYLQMNNLKTEDTAVYYCVRHANFGNSYISYWAYWGQGTLVTVSSGGGGSGGGGSGGGGSQTVVTQEPSLTVSPGGTVTLTCASSTGAVTSGNYPNWVQQKPGQAPRGLIGGTKFLVPGTPARFSGSLLGGKAALTLSGVQPEDEAEYYCTLWYSNRWVFGGGTKLTVLHHHHHH

SEQ ID NO: 3449 - protein, 514 aa, synthetic construct
  REGION 1..514: note = Description of Artificial Sequence: Synthetic polypeptide
QVQLQESGGGLVQAGGSLRLSCAASGGTFSSSAMGWFRQAPGKEREFVATITQNDVPTYYTHSVKGRFTISRDNAKNTMYLQMNSLKPEDTAVYYCAQRVAQASGWRTTIKDYGYWGQGTQVTVSSGGGGSGGGSEVQLVESGGGLVQPGNSLRLSCAASGFTFSKFGMSWVRQAPGKGLEWVSSISGSGRDTLYADSVKGRFTISRDNAKTTLYLQMNSLRPEDTAVYYCTIGGSLSVSSQGTLVTVSSGGGGSGGGSEVQLVESGGGLVQPGGSLKLSCAASGFTFNKYAINWVRQAPGKGLEWVARIRSKYNNYATYYADQVKDRFTISRDDSKNTAYLQMNNLKTEDTAVYYCVRHANFGNSYISYWAYWGQGTLVTVSSGGGGSGGGGSGGGGSQTVVTQEPSLTVSPGGTVTLTCASSTGAVTSGNYPNWVQQKPGQAPRGLIGGTKFLVPGTPARFSGSLLGGKAALTLSGVQPEDEAEYYCTLWYSNRWVFGGGTKLTVLHHHHHH

SEQ ID NO: 3450 - protein, 517 aa, synthetic construct
  REGION 1..517: note = Description of Artificial Sequence: Synthetic polypeptide
QVQLQESGGGLVQAGGSLRLSCAASGLTSSTYRMAWFRQAPGKEREFAAGISYSADSGGSTNYADSVKGRFTISRDNAKNTVYLQMSSLKPEDTAVYYCAAGRYSGTYNSPYSSSYVYWGQGTQVTVSSGGGGSGGGSEVQLVESGGGLVQPGNSLRLSCAASGFTFSKFGMSWVRQAPGKGLEWVSSISGSGRDTLYADSVKGRFTISRDNAKTTLYLQMNSLRPEDTAVYYCTIGGSLSVSSQGTLVTVSSGGGGSGGGSEVQLVESGGGLVQPGGSLKLSCAASGFTFNKYAINWVRQAPGKGLEWVARIRSKYNNYATYYADQVKDRFTISRDDSKNTAYLQMNNLKTEDTAVYYCVRHANFGNSYISYWAYWGQGTLVTVSSGGGGSGGGGSGGGGSQTVVTQEPSLTVSPGGTVTLTCASSTGAVTSGNYPNWVQQKPGQAPRGLIGGTKFLVPGTPARFSGSLLGGKAALTLSGVQPEDEAEYYCTLWYSNRWVFGGGTKLTVLHHHHHH

SEQ ID NO: 3451 - protein, 508 aa, synthetic construct
  REGION 1..508: note = Description of Artificial Sequence: Synthetic polypeptide
QVQLQESGGGLVQTGGSLRLSCAASGSTFSRNTMGWFRQAPGKERVFVLGISWSGIRSYYLDSAKARFTISRDNAKNTVYLQMNSLRPEDTAVYYCAAQEGSSPGPYKYWGQGTQVTVSSGGGGSGGGSEVQLVESGGGLVQPGNSLRLSCAASGFTFSKFGMSWVRQAPGKGLEWVSSISGSGRDTLYADSVKGRFTISRDNAKTTLYLQMNSLRPEDTAVYYCTIGGSLSVSSQGTLVTVSSGGGGSGGGSEVQLVESGGGLVQPGGSLKLSCAASGFTFNKYAINWVRQAPGKGLEWVARIRSKYNNYATYYADQVKDRFTISRDDSKNTAYLQMNNLKTEDTAVYYCVRHANFGNSYISYWAYWGQGTLVTVSSGGGGSGGGGSGGGGSQTVVTQEPSLTVSPGGTVTLTCASSTGAVTSGNYPNWVQQKPGQAPRGLIGGTKFLVPGTPARFSGSLLGGKAALTLSGVQPEDEAEYYCTLWYSNRWVFGGGTKLTVLHHHHHH

SEQ ID NO: 3452 - protein, 509 aa, synthetic construct
  REGION 1..509: note = Description of Artificial Sequence: Synthetic polypeptide
QVQLQESGGGVVQVGGSLRLSCAASGGTFGYYAVGWFRQAPGKEREFVAAVTWNGAYLYSDPVKGRFTISRDNAKNTVYLQMNSLKSEDTAVYYCGLDRWSAVVESTPSTRGQGTQVTVSSGGGGSGGGSEVQLVESGGGLVQPGNSLRLSCAASGFTFSKFGMSWVRQAPGKGLEWVSSISGSGRDTLYADSVKGRFTISRDNAKTTLYLQMNSLRPEDTAVYYCTIGGSLSVSSQGTLVTVSSGGGGSGGGSEVQLVESGGGLVQPGGSLKLSCAASGFTFNKYAINWVRQAPGKGLEWVARIRSKYNNYATYYADQVKDRFTISRDDSKNTAYLQMNNLKTEDTAVYYCVRHANFGNSYISYWAYWGQGTLVTVSSGGGGSGGGGSGGGGSQTVVTQEPSLTVSPGGTVTLTCASSTGAVTSGNYPNWVQQKPGQAPRGLIGGTKFLVPGTPARFSGSLLGGKAALTLSGVQPEDEAEYYCTLWYSNRWVFGGGTKLTVLHHHHHH

SEQ ID NO: 3453 - protein, 513 aa, synthetic construct
  REGION 1..513: note = Description of Artificial Sequence: Synthetic polypeptide
QVQLQESGGGLVQAGGSLRLSCAASGGAFSSYVMGWFRQAPGKEREFVAAVISWSGRITDYADSVKGRFSISRDNAKSTVYLQMNNLKPEDTAVYYCAAKTGMYIDLRTSTFDYWGQGTQVTVSSGGGGSGGGSEVQLVESGGGLVQPGNSLRLSCAASGFTFSKFGMSWVRQAPGKGLEWVSSISGSGRDTLYADSVKGRFTISRDNAKTTLYLQMNSLRPEDTAVYYCTIGGSLSVSSQGTLVTVSSGGGGSGGGSEVQLVESGGGLVQPGGSLKLSCAASGFTFNKYAINWVRQAPGKGLEWVARIRSKYNNYATYYADQVKDRFTISRDDSKNTAYLQMNNLKTEDTAVYYCVRHANFGNSYISYWAYWGQGTLVTVSSGGGGSGGGGSGGGGSQTVVTQEPSLTVSPGGTVTLTCASSTGAVTSGNYPNWVQQKPGQAPRGLIGGTKFLVPGTPARFSGSLLGGKAALTLSGVQPEDEAEYYCTLWYSNRWVFGGGTKLTVLHHHHHH

SEQ ID NO: 3454 - protein, 508 aa, synthetic construct
  REGION 1..508: note = Description of Artificial Sequence: Synthetic polypeptide
QVQLQESGGGSVQAGGSLRLSCTASGRTFTDYTMGWFRQAPGKEREFMLGISSNGYRRYYTGSMKDRFTISRDNVKKTVYLQMNDLKPEDTAVYYCAASEDHGAPRYDYWGQGTQVTVSSGGGGSGGGSEVQLVESGGGLVQPGNSLRLSCAASGFTFSKFGMSWVRQAPGKGLEWVSSISGSGRDTLYADSVKGRFTISRDNAKTTLYLQMNSLRPEDTAVYYCTIGGSLSVSSQGTLVTVSSGGGGSGGGSEVQLVESGGGLVQPGGSLKLSCAASGFTFNKYAINWVRQAPGKGLEWVARIRSKYNNYATYYADQVKDRFTISRDDSKNTAYLQMNNLKTEDTAVYYCVRHANFGNSYISYWAYWGQGTLVTVSSGGGGSGGGGSGGGGSQTVVTQEPSLTVSPGGTVTLTCASSTGAVTSGNYPNWVQQKPGQAPRGLIGGTKFLVPGTPARFSGSLLGGKAALTLSGVQPEDEAEYYCTLWYSNRWVFGGGTKLTVLHHHHHH

SEQ ID NO: 3455 - protein, 513 aa, synthetic construct
  REGION 1..513: note = Description of Artificial Sequence: Synthetic polypeptide
EVQLLESGGGLVQPGGSLTLSCAASGRTFSSYAMGWFRQAPGKEREFVAAISWSGSNTYYADSVKGRFTISRDNSKNTLYLQMNSLRAEDTAVYYCAAGGSTRVVVTTTPVVKYWGQGTLVTVSSGGGGSGGGSEVQLVESGGGLVQPGNSLRLSCAASGFTFSKFGMSWVRQAPGKGLEWVSSISGSGRDTLYADSVKGRFTISRDNAKTTLYLQMNSLRPEDTAVYYCTIGGSLSVSSQGTLVTVSSGGGGSGGGSEVQLVESGGGLVQPGGSLKLSCAASGFTFNKYAINWVRQAPGKGLEWVARIRSKYNNYATYYADQVKDRFTISRDDSKNTAYLQMNNLKTEDTAVYYCVRHANFGNSYISYWAYWGQGTLVTVSSGGGGSGGGGSGGGGSQTVVTQEPSLTVSPGGTVTLTCASSTGAVTSGNYPNWVQQKPGQAPRGLIGGTKFLVPGTPARFSGSLLGGKAALTLSGVQPEDEAEYYCTLWYSNRWVFGGGTKLTVLHHHHHH

SEQ ID NO: 3456 - protein, 513 aa, synthetic construct
  REGION 1..513: note = Description of Artificial Sequence: Synthetic polypeptide
EVQLLESGGGLVQPGGSLTLSCAASGRTFSSYAMGWFRQAPGMEREFVAAISWSGYSTYYADSVKGRFTISRDNSKNTLYLQMNSLRAEDTAVYYCAAGGSTRVVVTTTPVVKYWGQGTLVTVSSGGGGSGGGSEVQLVESGGGLVQPGNSLRLSCAASGFTFSKFGMSWVRQAPGKGLEWVSSISGSGRDTLYADSVKGRFTISRDNAKTTLYLQMNSLRPEDTAVYYCTIGGSLSVSSQGTLVTVSSGGGGSGGGSEVQLVESGGGLVQPGGSLKLSCAASGFTFNKYAINWVRQAPGKGLEWVARIRSKYNNYATYYADQVKDRFTISRDDSKNTAYLQMNNLKTEDTAVYYCVRHANFGNSYISYWAYWGQGTLVTVSSGGGGSGGGGSGGGGSQTVVTQEPSLTVSPGGTVTLTCASSTGAVTSGNYPNWVQQKPGQAPRGLIGGTKFLVPGTPARFSGSLLGGKAALTLSGVQPEDEAEYYCTLWYSNRWVFGGGTKLTVLHHHHHH

SEQ ID NO: 3457 - protein, 499 aa, synthetic construct
  REGION 1..499: note = Description of Artificial Sequence: Synthetic polypeptide
EVQLVESGGGLVQPGGSLTLSCAASGSTFSINHFSWYRQAPGKQRELVAFISSDGVSIDVESVKGRFTISGDNSKNTAYLQMNSLRAEDTAVYYCYYRGFWGQGTLVTVSSGGGGSGGGSEVQLVESGGGLVQPGNSLRLSCAASGFTFSKFGMSWVRQAPGKGLEWVSSISGSGRDTLYADSVKGRFTISRDNAKTTLYLQMNSLRPEDTAVYYCTIGGSLSVSSQGTLVTVSSGGGGSGGGSEVQLVESGGGLVQPGGSLKLSCAASGFTFNKYAINWVRQAPGKGLEWVARIRSKYNNYATYYADQVKDRFTISRDDSKNTAYLQMNNLKTEDTAVYYCVRHANFGNSYISYWAYWGQGTLVTVSSGGGGSGGGGSGGGGSQTVVTQEPSLTVSPGGTVTLTCASSTGAVTSGNYPNWVQQKPGQAPRGLIGGTKFLVPGTPARFSGSLLGGKAALTLSGVQPEDEAEYYCTLWYSNRWVFGGGTKLTVLHHHHHH

SEQ ID NO: 3458 - protein, 513 aa, synthetic construct
  REGION 1..513: note = Description of Artificial Sequence: Synthetic polypeptide
EVQLLESGGGLVQPGGSLTLSCAASGRTFSSYALGWFRQAPGKEREFVAAISWSGGNTYYADSVKGRFTISRDNSKNTLYLQMNSLRAEDTAVYYCAAGGSTRVVVTTTPVVKYWGQGTLVTVSSGGGGSGGGSEVQLVESGGGLVQPGNSLRLSCAASGFTFSKFGMSWVRQAPGKGLEWVSSISGSGRDTLYADSVKGRFTISRDNAKTTLYLQMNSLRPEDTAVYYCTIGGSLSVSSQGTLVTVSSGGGGSGGGSEVQLVESGGGLVQPGGSLKLSCAASGFTFNKYAINWVRQAPGKGLEWVARIRSKYNNYATYYADQVKDRFTISRDDSKNTAYLQMNNLKTEDTAVYYCVRHANFGNSYISYWAYWGQGTLVTVSSGGGGSGGGGSGGGGSQTVVTQEPSLTVSPGGTVTLTCASSTGAVTSGNYPNWVQQKPGQAPRGLIGGTKFLVPGTPARFSGSLLGGKAALTLSGVQPEDEAEYYCTLWYSNRWVFGGGTKLTVLHHHHHH

SEQ ID NO: 3459 - protein, 513 aa, synthetic construct
  REGION 1..513: note = Description of Artificial Sequence: Synthetic polypeptide
EVQLLESGGGLVQPGGSLTLSCAASERTFSSYTMGWFRQAPGKEREFVAAMSWSGGSTYYADSVKGRFTISRDNSKNTLYLQMNSLRAEDTAVYYCAAGGSTRVVVTTTPVVKYWGQGTLVTVSSGGGGSGGGSEVQLVESGGGLVQPGNSLRLSCAASGFTFSKFGMSWVRQAPGKGLEWVSSISGSGRDTLYADSVKGRFTISRDNAKTTLYLQMNSLRPEDTAVYYCTIGGSLSVSSQGTLVTVSSGGGGSGGGSEVQLVESGGGLVQPGGSLKLSCAASGFTFNKYAINWVRQAPGKGLEWVARIRSKYNNYATYYADQVKDRFTISRDDSKNTAYLQMNNLKTEDTAVYYCVRHANFGNSYISYWAYWGQGTLVTVSSGGGGSGGGGSGGGGSQTVVTQEPSLTVSPGGTVTLTCASSTGAVTSGNYPNWVQQKPGQAPRGLIGGTKFLVPGTPARFSGSLLGGKAALTLSGVQPEDEAEYYCTLWYSNRWVFGGGTKLTVLHHHHHH

SEQ ID NO: 3460 - protein, 513 aa, synthetic construct
  REGION 1..513: note = Description of Artificial Sequence: Synthetic polypeptide
EVQLLESGGGLVQPGGSLTLSCAASGRTFSSYAMGWFRQAPGKEREFVAAISWSGSSTYYADSVKGRFTISRDNSKNTLYLQMNSLRAEDTAVYYCAAGGSTRVVVTTTPVVKYWGQGTLVTVSSGGGGSGGGSEVQLVESGGGLVQPGNSLRLSCAASGFTFSKFGMSWVRQAPGKGLEWVSSISGSGRDTLYADSVKGRFTISRDNAKTTLYLQMNSLRPEDTAVYYCTIGGSLSVSSQGTLVTVSSGGGGSGGGSEVQLVESGGGLVQPGGSLKLSCAASGFTFNKYAINWVRQAPGKGLEWVARIRSKYNNYATYYADQVKDRFTISRDDSKNTAYLQMNNLKTEDTAVYYCVRHANFGNSYISYWAYWGQGTLVTVSSGGGGSGGGGSGGGGSQTVVTQEPSLTVSPGGTVTLTCASSTGAVTSGNYPNWVQQKPGQAPRGLIGGTKFLVPGTPARFSGSLLGGKAALTLSGVQPEDEAEYYCTLWYSNRWVFGGGTKLTVLHHHHHH

SEQ ID NO: 3461 - protein, 505 aa, synthetic construct
  REGION 1..505: note = Description of Artificial Sequence: Synthetic polypeptide
EVQLVESGGGLVQPGGSLKLSCAASGFTFNKYAINWVRQAPGKGLEWVARIRSKYNNYATYYADQVKDRFTISRDDSKNTAYLQMNNLKTEDTAVYYCVRHANFGNSYISYWAYWGQGTLVTVSSGGGGSGGGGSGGGGSQTVVTQEPSLTVSPGGTVTLTCASSTGAVTSGNYPNWVQQKPGQAPRGLIGGTKFLVPGTPARFSGSLLGGKAALTLSGVQPEDEAEYYCTLWYSNRWVFGGGTKLTVLGGGGSGGGSEVQLVESGGGLVQPGNSLRLSCAASGFTFSKFGMSWVRQAPGKGLEWVSSISGSGRDTLYADSVKGRFTISRDNAKTTLYLQMNSLRPEDTAVYYCTIGGSLSVSSQGTLVTVSSGGGGSGGGSEVQLVESGGGLVQPGGSLTLSCAASSSSVSLLSLAWYRQAPGKKRELVAGISDDGSIVYMDSVKGRFTISRDNAKNSVYLQMNSLRAEDTAVYYCYAYSWITRSPYWGQGTLVTVSSHHHHHH

SEQ ID NO: 3462 - protein, 505 aa, synthetic construct
  REGION 1..505: note = Description of Artificial Sequence: Synthetic polypeptide
EVQLVESGGGLVQPGGSLTLSCAASSSSVSLLSLAWYRQAPGKKRELVAGISDDGSIVYMDSVKGRFTISRDNAKNSVYLQMNSLRAEDTAVYYCYAYSWITRSPYWGQGTLVTVSSGGGGSGGGSEVQLVESGGGLVQPGNSLRLSCAASGFTFSKFGMSWVRQAPGKGLEWVSSISGSGRDTLYADSVKGRFTISRDNAKTTLYLQMNSLRPEDTAVYYCTIGGSLSVSSQGTLVTVSSGGGGSGGGSEVQLVESGGGLVQPGGSLKLSCAASGFTFNKYAINWVRQAPGKGLEWVARIRSKYNNYATYYADQVKDRFTISRDDSKNTAYLQMNNLKTEDTAVYYCVRHANFGNSYISYWAYWGQGTLVTVSSGGGGSGGGGSGGGGSQTVVTQEPSLTVSPGGTVTLTCASSTGAVTSGNYPNWVQQKPGQAPRGLIGGTKFLVPGTPARFSGSLLGGKAALTLSGVQPEDEAEYYCTLWYSNRWVFGGGTKLTVLHHHHHH

SEQ ID NO: 3463 - protein, 440 aa, synthetic construct
  REGION 1..440: note = Description of Artificial Sequence: Synthetic polypeptide
QVQLVESGGGVVQPGRSLRLDCKASGITFSNSGMHWVRQAPGKGLEWVAVIWYDGSKRYYADSVKGRFTISRDNSKNTLFLQMNSLRAEDTAVYYCATNDDYWGQGTLVTVSSASTKGPSVFPLAPCSRSTSESTAALGCLVKDYFPEPVTVSWNSGALTSGVHTFPAVLQSSGLYSLSSVVTVPSSSLGTKTYTCNVDHKPSNTKVDKRVESKYGPPCPPCPAPEFLGGPSVFLFPPKPKDTLMISRTPEVTCVVVDVSQEDPEVQFNWYVDGVEVHNAKTKPREEQFNSTYRVVSVLTVLHQDWLNGKEYKCKVSNKGLPSSIEKTISKAKGQPREPQVYTLPPSQEEMTKNQVSLTCLVKGFYPSDIAVEWESNGQPENNYKTTPPVLDSDGSFFLYSRLTVDKSRWQEGNVFSCSVMHEALHNHYTQKSLSLSLGK

SEQ ID NO: 3464 - protein, 214 aa, synthetic construct
  REGION 1..214: note = Description of Artificial Sequence: Synthetic polypeptide
EIVLTQSPATLSLSPGERATLSCRASQSVSSYLAWYQQKPGQAPRLLIYDASNRATGIPARFSGSGSGTDFTLTISSLEPEDFAVYYCQQSSNWPRTFGQGTKVEIKRTVAAPSVFIFPPSDEQLKSGTASVVCLLNNFYPREAKVQWKVDNALQSGNSQESVTEQDSKDSTYSLSSTLTLSKADYEKHKVYACEVTHQGLSSPVTKSFNRGEC

SEQ ID NO: 3465 - protein, 447 aa, synthetic construct
  REGION 1..447: note = Description of Artificial Sequence: Synthetic polypeptide
QVQLVQSGVEVKKPGASVKVSCKASGYTFTNYYMYWVRQAPGQGLEWMGGINPSNGGTNFNEKFKNRVTLTTDSSTTTAYMELKSLQFDDTAVYYCARRDYRFDMGFDYWGQGTTVTVSSASTKGPSVFPLAPCSRSTSESTAALGCLVKDYFPEPVTVSWNSGALTSGVHTFPAVLQSSGLYSLSSVVTVPSSSLGTKTYTCNVDHKPSNTKVDKRVESKYGPPCPPCPAPEFLGGPSVFLFPPKPKDTLMISRTPEVTCVVVDVSQEDPEVQFNWYVDGVEVHNAKTKPREEQFNSTYRVVSVLTVLHQDWLNGKEYKCKVSNKGLPSSIEKTISKAKGQPREPQVYTLPPSQEEMTKNQVSLTCLVKGFYPSDIAVEWESNGQPENNYKTTPPVLDSDGSFFLYSRLTVDKSRWQEGNVFSCSVMHEALHNHYTQKSLSLSLGK

SEQ ID NO: 3466 - protein, 218 aa, synthetic construct
  REGION 1..218: note = Description of Artificial Sequence: Synthetic polypeptide
EIVLTQSPATLSLSPGERATLSCRASKGVSTSGYSYLHWYQQKPGQAPRLLIYLASYLESGVPARFSGSGSGTDFTLTISSLEPEDFAVYYCQHSRDLPLTFGGGTKVEIKRTVAAPSVFIFPPSDEQLKSGTASVVCLLNNFYPREAKVQWKVDNALQSGNSQESVTEQDSKDSTYSLSSTLTLSKADYEKHKVYACEVTHQGLSSPVTKSFNRGEC

SEQ ID NO: 3467 - protein, 118 aa, synthetic construct
  REGION 1..118: note = Description of Artificial Sequence: Synthetic polypeptide
EVQLLESGGGLVQPGGSLRLSCAASGFTFSSYIMMWVRQAPGKGLEWVSSIYPSGGITFYADKGRFTISRDNSKNTLYLQMNSLRAEDTAVYYCARIKLGTVTTVDYWGQGTLVTVSS

SEQ ID NO: 3468 - protein, 110 aa, synthetic construct
  REGION 1..110: note = Description of Artificial Sequence: Synthetic polypeptide
QSALTQPASVSGSPGQSITISCTGTSSDVGGYNYVSWYQQHPGKAPKLMIYDVSNRPSGVSNRFSGSKSGNTASLTISGLQAEDEADYYCSSYTSSSTRVEGTGTKVTVL

SEQ ID NO: 3469 - protein, 120 aa, synthetic construct
  REGION 1..120: note = Description of Artificial Sequence: Synthetic polypeptide
EVQLLESGGGLVQPGGSLRLSCAASGFTFSSYIMMWVRQAPGKGLEWVSSIYPSGGITFYADTVKGRFTISRDNSKNTLYLQMNSLRAEDTAVYYCARIKLGTVTTVDYWGQGTLVTVSS

SEQ ID NO: 3470 - protein, 110 aa, synthetic construct
  REGION 1..110: note = Description of Artificial Sequence: Synthetic polypeptide
QSALTQPASVSGSPGQSITISCTGTSSDVGGYNYVSWYQQHPGKAPKLMIYDVSNRPSGVSNRFSGSKSGNTASLTISGLQAEDEADYYCSSYTSSSTRVFGTGTKVTVL

SEQ ID NO: 3471 - protein, 118 aa, synthetic construct
  REGION 1..118: note = Description of Artificial Sequence: Synthetic polypeptide
EVQLVESGGGLVQPGGSLRLSCAASGFTFSDSWIHWVRQAPGKGLEWVAWISPYGGSTYYADSVKGRFTISADTSKNTAYLQMNSLRAEDTAVYYCARRHWPGGFDYWGQGTLVTVSA

SEQ ID NO: 3472 - protein, 108 aa, synthetic construct
  REGION 1..108: note = Description of Artificial Sequence: Synthetic polypeptide
DIQMTQSPSSLSASVGDRVTITCRASQDVSTAVAWYQQKPGKAPKLLIYSASFLYSGVPSRFSGSGSGTDFTLTISSLQPEDFATYYCQQYLYHPATFGQGTKVEIKR

SEQ ID NO: 3473 - protein, 123 aa, synthetic construct
  REGION 1..123: note = Description of Artificial Sequence: Synthetic polypeptide
QVQLVESGGGVVQPGRSLRLSCAASGFTESSYGMHWVRQAPGKGLEWVAVIWYEGSNKYYADSVKGRFTISRDNSKNTLYLQMNSLRAEDTAVYYCARGGSMVRGDYYYGMDVWGQGTTVTVS

SEQ ID NO: 3474 - protein, 105 aa, synthetic construct
  REGION 1..105: note = Description of Artificial Sequence: Synthetic polypeptide
AIQLTQSPSSLSASVGDRVTITCRASQGISSALAWYQQKPGKAPKWYDASSLESGVPSRFSGSGSGTDFTLTISSLQPEDFATYYCQQFNSYPYTFGQGTKLEIK

SEQ ID NO: 3475 - protein, 123 aa, synthetic construct
  REGION 1..123: note = Description of Artificial Sequence: Synthetic polypeptide
QVQLVESGGGVVQPGRSLRLSCAASGFTESSYGFHWVRQAPGKGLEWVAVIWYAGSNKFYADSVKGRFTISRDNSKNTLYLQMNSLRAEDTAVYYCARGGQLDYYYYYVMDVWGQGTTVTVSS

SEQ ID NO: 3476 - protein, 107 aa, synthetic construct
  REGION 1..107: note = Description of Artificial Sequence: Synthetic polypeptide
DIQMTQSPSSLSASVGDRVTITCRASQGISSWLAWYQQKPEKAPKSLIYAASSLQSGVPSRFSGSGSGTDFTLTISSLQPEDFATYYCQQYNSYPYTFGQGTKLEIK

SEQ ID NO: 3477 - protein, 123 aa, synthetic construct
  REGION 1..123: note = Description of Artificial Sequence: Synthetic polypeptide
VQLVESGGGVVQPGRSLRLSCAASGFTFSSYGMEIWVRQAPGKGLEWVAVIWYAGSNKYYADSVKGRFTISRDNSKNTLYLQMNSLRAEDTAVYYCARGGRIAVAFYYSMDVWGQGTTVTVSS

SEQ ID NO: 3478 - protein, 107 aa, synthetic construct; identical to SEQ ID NO: 3476
  REGION 1..107: note = Description of Artificial Sequence: Synthetic polypeptide

SEQ ID NO: 3479 - protein, 449 aa, synthetic construct
  REGION 1..449: note = Description of Artificial Sequence: Synthetic polypeptide
QVQLVESGGGVVQPGRSLRLSCAASGFTFSSYGMHWVRQAPGKGLEWVAVIWYEGSNKYYADSVKGRFTISRDNSKNTLYLQMNSLRAEDTAVYYCARGGSMVRGDYYYGMDVWGQGTTVTVSSASTKGPSVFPLAPCSRSTSESTAALGCLVKDYFPEPVTVSWNSGALTSGVHTFPAVLQSSGLYSLSSVVTVPSSNFGTQTYTCNVDHKPSNTKVDKTVERKCCVECPPCPAPPVAGPSVFLFPPKPKDTLMISRTPEVTCVVVDVSHEDPEVQFNWYVDGVEVHNAKTKPREEQFNSTFRVVSVLTVVHQDWLNGKEYKCKVSNKGLPAPIEKTISKTKGQPREPQVYTLPPSREEMTKNQVSLTCLVKGFYPSDIAVEWESNGQPENNYKTTPPMLDSDGSFFLYSKLTVDKSRWQQGNVFSCSVMHEALHNHYTQKSLSLSPG

SEQ ID NO: 3480 - protein, 214 aa, synthetic construct
  REGION 1..214: note = Description of Artificial Sequence: Synthetic polypeptide
AIQLTQSPSSLSASVGDRVTITCRASQGISSALAWYQQKPGKAPKLLIYDASSLESGVPSRFSGSGSGTDFTLTISSLQPEDFATYYCQQFNSYPYTFGQGTKLEIKRTVAAPSVFIFPPSDEQLKSGTASVVCLLNNFYPREAKVQWKVDNALQSGNSQESVTEQDSKDSTYSLSSTLTLSKADYEKHKVYACEVTHQGLSSPVTKSFNRGEC

SEQ ID NO: 3481 - protein, 453 aa, synthetic construct
  REGION 1..453: note = Description of Artificial Sequence: Synthetic polypeptide
QVQLVESGGGVVQPGRSLRLSCAASGFTFSSYGMHWVRQAPGKGLEWVAVIWYEGSNKYYADSVKGRFTISRDNSKNTLYLQMNSLRAEDTAVYYCARGGSMVRGDYYYGMDVWGQGTTVTVSSASTKGPSVFPLAPSSKSTSGGTAALGCLVKDYFPEPVTVSWNSGALTSGVHTFPAVLQSSGLYSLSSVVTVPSSSLGTQTYICNVNHKPSNTKVDKRVEPKSCDKTHTCPPCPAPEAEGAPSVFLEPPKPKDTLMISRTPEVTCVVVDVSHEDPEVKFNWYVDGVEVHNAKTKPREEQYNSTYRVVSVLTVLHQDWLNGKEYKCKVSNKALPSSIEKTISKAKGQPREPQVYTLPPSREEMTKNQVSLTCLVKGFYPSDIAVEWESNGQPENNYKTTPPVLDSDGSFFLYSKLTVDKSRWQQGNVFSCSVMHEALHNHYTQKSLSLSPG

SEQ ID NO: 3482 - protein, 214 aa, synthetic construct; identical to SEQ ID NO: 3480
  REGION 1..214: note = Description of Artificial Sequence: Synthetic polypeptide

SEQ ID NO: 3483 - protein, 118 aa, synthetic construct
  REGION 1..118: note = Description of Artificial Sequence: Synthetic polypeptide
QVQLVESGGGVVQPGRSLRLSCAASGFTFSSYAMSWVRQAPGKGLEWVASISSGGTTYYPDSVKGRFTISRDNSKNTLYLQMNSLRAEDTAVYYCARVGGYYDSMDYWGQGTLVTVSS

SEQ ID NO: 3484 - protein, 112 aa, synthetic construct
  REGION 1..112: note = Description of Artificial Sequence: Synthetic polypeptide
  VARIANT 31: note = MOD_RES - Any amino acid
  VARIANT 57: note = MOD_RES - Any amino acid
EIVLTQSPGTLSLSPGERATLSCRASESVDXYGVSFMNWYQQKPGQAPRLLIYAASXQGSGIPDRFSGSGSGTDFTLTISRLEPEDFAVYYCQQTKEVTWTFGQGTKVEIKR

SEQ ID NO: 3485 - protein, 5 aa, synthetic construct
  REGION 1..5: note = Description of Artificial Sequence: Synthetic peptide
SYGMH

SEQ ID NO: 3486 - protein, 17 aa, synthetic construct
  REGION 1..17: note = Description of Artificial Sequence: Synthetic peptide
VIWYEGSNKYYAESVKG

SEQ ID NO: 3487 - protein, 14 aa, synthetic construct
  REGION 1..14: note = Description of Artificial Sequence: Synthetic peptide
GGRLGKDYYSGMDV

SEQ ID NO: 3488 - protein, 11 aa, synthetic construct
  REGION 1..11: note = Description of Artificial Sequence: Synthetic peptide
RASQGIRNDLG

SEQ ID NO: 3489 - protein, 7 aa, synthetic construct
  REGION 1..7: note = Description of Artificial Sequence: Synthetic peptide
ATSSLQS

SEQ ID NO: 3490 - protein, 9 aa, synthetic construct
  REGION 1..9: note = Description of Artificial Sequence: Synthetic peptide
LQHNTYPWT

SEQ ID NO: 3491 - protein, 120 aa, synthetic construct
  REGION 1..120: note = Description of Artificial Sequence: Synthetic polypeptide
QVQLVQSGAEVKKPGASVKVSCKASGYTFTDYNINWVRQAPGQGLEWMGYIYPYIGGSGYAQKFQGRVTMTRDTSTSTVYMELSSLRSEDTAVYYCAREDKTARNAMDYWGQGTLVTVSS

SEQ ID NO: 3492 - protein, 107 aa, synthetic construct
  REGION 1..107: note = Description of Artificial Sequence: Synthetic polypeptide
DIQMTQSPSSLSASVGDRVTITCRVSENIYSNLAWYQQKPGKAPKLLIYEATNLAEGVPSRFSGSGSGTDFTLTISSLQPEDFATYYCQHFWGTPYTFGQGTKLEIK

SEQ ID NO: 3493 - protein, 447 aa, synthetic construct
  REGION 1..447: note = Description of Artificial Sequence: Synthetic polypeptide
QVQLVQSGAEVKKPGASVKVSCKASGYTFTDYNINWVRQAPGQGLEWMGYIYPYIGGSGYAQKFQGRVTMTRDTSTSTVYMELSSLRSEDTAVYYCAREDKTARNAMDYWGQGTLVTVSSASTKGPSVFPLAPCSRSTSESTAALGCLVKDYFPEPVTVSWNSGALTSGVHTFPAVLQSSGLYSLSSVVTVPSSSLGTKTYTCNVDHKPSNTKVDKRVESKYGPPCPPCPAPEFLGGPSVFLFPPKPKDTLMISRTPEVTCVVVDVSQEDPEVQFNWYVDGVEVHNAKTKPREEQFNSTYRVVSVLTVLHQDWLNGKEYKCKVSNKGLPSSIEKTISKAKGQPREPQVYTLPPSQEEMTKNQVSLTCLVKGFYPSDIAVEWESNGQPENNYKTTPPVLDSDGSFFLYSRLTVDKSRWQEGNVFSCSVMHEALHNHYTQKSLSLSPGK

SEQ ID NO: 3494 - protein, 214 aa, synthetic construct
  REGION 1..214: note = Description of Artificial Sequence: Synthetic polypeptide
DIQMTQSPSSLSASVGDRVTITCRVSENIYSNLAWYQQKPGKAPKLLIYEATNLAEGVPSRFSGSGSGTDFTLTISSLQPEDFATYYCQHFWGTPYTFGQGTKLEIKRTVAAPSVFIFPPSDEQLKSGTASVVCLLNNFYPREAKVQWKVDNALQSGNSQESVTEQDSKDSTYSLSSTLTLSKADYEKHKVYACEVTHQGLSSPVTKSFNRGEC

SEQ ID NO: 3495 - protein, 127 aa, synthetic construct
  REGION 1..127: note = Description of Artificial Sequence: Synthetic polypeptide
EVQLLESGGGLVQPGGSLTLSCAASGGTWSSYATGWFRQAPGKERELIAGISRSGGRTYYADSVKGRFTISRDNSKNTLYLQMNSLRAEDTAVYYCAAARYFTSSVVYTSGNDYDYWGQGTLVTVSS

SEQ ID NO: 3496 - protein, 127 aa, synthetic construct
  REGION 1..127: note = Description of Artificial Sequence: Synthetic polypeptide
EVQLLESGGGLVQPGGSLTLSCAASGGTWSSYATGWFRQAPGKERELIAGISRSGGRTYYADSVKGRFTISRDNSKNTVYLQMNSLRAEDTAVYYCAKARYFTSSVVYTSGNDYDYWGQGTLVTVSS

SEQ ID NO: 3497 - protein, 10 aa, synthetic construct
  REGION 1..10: note = Description of Artificial Sequence: Synthetic peptide
GGTWSSYATG

SEQ ID NO: 3498 - protein, 10 aa, synthetic construct
  REGION 1..10: note = Description of Artificial Sequence: Synthetic peptide
GGTWSSYATG

SEQ ID NO: 3499 - protein, 17 aa, synthetic construct
  REGION 1..17: note = Description of Artificial Sequence: Synthetic peptide
GISRSGGRTYYADSVKG

SEQ ID NO: 3500 - protein, 17 aa, synthetic construct
  REGION 1..17: note = Description of Artificial Sequence: Synthetic peptide
GISRSGGRTYYADSVKG

SEQ ID NO: 3501 - protein, 18 aa, synthetic construct
  REGION 1..18: note = Description of Artificial Sequence: Synthetic peptide
ARYFTSSVVYTSGNDYDY

SEQ ID NO: 3502 - protein, 18 aa, synthetic construct
  REGION 1..18: note = Description of Artificial Sequence: Synthetic peptide
ARYFTSSVVYTSGNDYDY

SEQ ID NO: 3503 - protein, 6 aa, synthetic construct
  REGION 1..6: note = Description of Artificial Sequence: Synthetic 6xHis tag
HHHHHH

SEQ ID NO: 3504 - protein, 9 aa, synthetic construct
  REGION 1..9: note = Description of Artificial Sequence: Synthetic peptide
GGGGSGGGS

SEQ ID NO: 3505 - protein, 10 aa, synthetic construct
  REGION 1..10: note = Description of Artificial Sequence: Synthetic peptide
INSSGSTNYG

SEQ ID NO: 3506 - protein, 10 aa, synthetic construct
  REGION 1..10: note = Description of Artificial Sequence: Synthetic peptide
NAGGGPLGSR

SEQ ID NO: 3507 - protein, 10 aa, synthetic construct
  REGION 1..10: note = Description of Artificial Sequence: Synthetic peptide
ISSGGSTNVR

SEQ ID NO: 3508 - protein, 10 aa, synthetic construct
  REGION 1..10: note = Description of Artificial Sequence: Synthetic peptide
NADTIGTARD

SEQ ID NO: 3509 - protein, 618 aa, Homo sapiens; identical to SEQ ID NO: 3216

SEQ ID NO: 3510 - DNA, 1320 bp, synthetic construct
  misc_feature 1..1320: note = Description of Artificial Sequence: Synthetic polynucleotide
  source 1..1320: mol_type = other DNA
gaggtgcagctgttggagtctgggggaggcttggtacagcctggggggtccctgagactctcctgtgcagcagcctctggattcactttcagtagctatgacatgtcttgggtccgccaggctccagggaaggggctggactgggtctcaaccattagtggtggtggtacttacacctactatcaagacagtgtgaaggggcggttcaccatctccagagacaattccaagaacacgctgtatctgcaaatgaacagcctgagagccgaggacacggccgtatattactgtgcgtccatggactactgggggcaagggaccacggtcaccgtctcctcagcatccaccaagggcccatcggtcttcccgctagcaccctgctccaggagcacctccgagagcacagccgccctgggctgcctggtcaaggactacttccccgaaccagtgacggtgtcgtggaactcaggcgccctgaccagcggcgtgcacaccttcccggctgtcctacagtcctcaggactctactccctcagcagcgtggtgaccgtgccctccagcagcttgggcacgaagacctacacctgcaacgtagatcacaagcccagcaacaccaaggtggacaagagagttgagtccaaatatggtcccccatgcccaccatgcccagcacctgagttcctggggggaccatcagtcttcctgttccccccaaaacccaaggacactctcatgatctcccggacccctgaggtcacgtgcgtggtggtggacgtgagccaggaagaccccgaggtccagttcaactggtacgtggatggcgtggaggtgcataatgccaagacaaagccgcgggaggagcagttcaacagcacgtaccgtgtggtcagcgtcctcaccgtcctgcaccaggactggctgaacggcaaggagtacaagtgcaaggtctccaacaaaggcctcccgtcctccatcgagaaaaccatctccaaagccaaagggcagccccgagagccacaggtgtacaccctgcccccatcccaggaggagatgaccaagaaccaggtcagcctgacctgcctggtcaaaggcttctaccccagcgacatcgccgtggagtgggagagcaatgggcagccggagaacaactacaagaccacgcctcccgtgctggactccgacggctccttcttcctctacagcaggctaaccgtggacaagagcaggtggcaggaggggaatgtcttctcatgctccgtgatgcatgaggctctgcacaaccactacacacagaagagcctctccctgtctctgggtaaa

SEQ ID NO: 3511 - DNA, 642 bp, synthetic construct
  misc_feature 1..642: note = Description of Artificial Sequence: Synthetic polynucleotide
  source 1..642: mol_type = other DNA
gacatccagatgacccagtctccatcctccctgtctgcatctgtaggagacagagtcaccatcacttgccgggcaagtcagagcattaggaggtatttaaattggtatcaccagaaaccagggaaagcccctaagctcctgatctatggtgcatccaccttgcaaagtggggtcccatcaaggttcagtggtagtggatctgggacagatttcactctcaccatcagcagtctgcaacctgaagattttgcagtgtattactgtcaacagagtcacagtgcccccctcactttcggcggagggaccaaggtggagatcaaacgaactgtggctgcaccatctgtcttcatcttcccgccatctgatgagcaattgaaatctggaactgcctctgttgtgtgcctgctgaataacttctatcccagagaggccaaagtacagtggaaggtggataacgccctccaatcgggtaactcccaggagagtgtcacagagcaggacagcaaggacagcacctacagcctcagcagcaccctgacgctgagcaaagcagactacgagaaacacaaagtctacgcctgcgaagtcacccatcagggcctcagctcgcccgtcacaaagagcttcaacaggggagagtgt

SEQ ID NO: 3512 - protein, 117 aa, synthetic construct
  REGION 1..117: note = Description of Artificial Sequence: Synthetic polypeptide
EVQLLESGGGLVQPGGSLRLSCAASGFTFSSYYMSWVRQAPGKGLEWVSAISGSGGSTYYADSVKGRFTISRDNSKNTLYLQMNSLRAEDTAVYYCARYARTAFDLWGQGTLVTVSS

SEQ ID NO: 3513 - protein, 447 aa, synthetic construct
  REGION 1..447: note = Description of Artificial Sequence: Synthetic polypeptide
EVQLLESGGGLVQPGGSLRLSCAASGFTFSSYYMSWVRQAPGKGLEWVSAISGSGGSTYYADSVKGRFTISRDNSKNTLYLQMNSLRAEDTAVYYCARYARTAFDLWGQGTLVTVSSASTKGPSVFPLAPSSKSTSGGTAALGCLVKDYFPEPVTVSWNSGALTSGVHTFPAVLQSSGLYSLSSVVTVPSSSLGTQTYICNVNHKPSNTKVDKRVEPKSCDKTHTCPPCPAPEAEGAPSVFLFPPKPKDTLMISRTPEVTCVVVDVSHEDPEVKFNWYVDGVEVHNAKTKPREEQYNSTYRVVSVLTVLHQDWLNGKEYKCKVSNKALPSSIEKTISKAKGQPREPQVYTLPPSREEMTKNQVSLTCLVKGFYPSDIAVEWESNGQPENNYKTTPPVLDSDGSFFLYSKLTVDKSRWQQGNVFSCSVMHEALHNHYTQKSLSLSPGK

SEQ ID NO: 3514 - protein, 214 aa, synthetic construct
  REGION 1..214: note = Description of Artificial Sequence: Synthetic polypeptide
DIVMTQSPSSLSASVGDGVTITCQASQDIYNYLNWYQQKPGKAPKLLIYAASSLQSGVPSRFSGSGSGTDFTLTISSLQPEDFATYYCQQANSFPPTFGQGTKLEIKRTVAAPSVFIFPPSDEQLKSGTASVVCLLNNFYPREAKVQWKVDNALQSGNSQESVTEQDSKDSTYSLSSTLTLSKADYEKHKVYACEVTHQGLSSPVTKSFNRGEC

SEQ ID NO: 3515 - protein, 118 aa, synthetic construct
  REGION 1..118: note = Description of Artificial Sequence: Synthetic polypeptide
QVQLHQSGAELVKPGASVKISCKGSGYDFSNFWMNWVKQRPGKGLEWIGQIYPGDGEIKYNGKFKGKATLTADESSSTAYIHLSSLTSEDSAVYFCARDDYLRAMDYWGQGTSVTVSS

SEQ ID NO: 3516 - protein, 107 aa, synthetic construct
  REGION 1..107: note = Description of Artificial Sequence: Synthetic polypeptide
DIQMTQSPASLSASVGETVTITCRASGNIHNYLAWFQQKQGKSPHFLVYSAKALADGVPSRFSGSGSGTQYSLKINSLQPEDFGTYYCQHFWSSPYTFGGGTKLEIK

SEQ ID NO: 3517 - protein, 452 aa, synthetic construct
  REGION 1..452: note = Description of Artificial Sequence: Synthetic polypeptide
EVQLVQSGAEVKKPGESLKISCKGSGYSFTSYWMNWVRQMPGKGLEWMGRIDPYDSETHYSPSFQGQVTISADKSISTAYLQWSSLKASDTAMYYCARGGYDFDVGTLYWFFDVWGQGTTVTVSSASTKGPSVFPLAPCSRSTSESTAALGCLVKDYFPEPVTVSWNSGALTSGVHTFPAVLQSSGLYSLSSVVTVPSSSLGTKTYTCNVDHKPSNTKVDKRVESKYGPPCPPCPAPEFLGGPSVFLFPPKPKDTLMISRTPEVTCVVVDVSQEDPEVQFNWYVDGVEVHNAKTKPREEQFNSTYRVVSVLTVLHQDWLNGKEYKCKVSNKGLPSSIEKTISKAKGQPREPQVYTLPPSQEEMTKNQVSLTCLVKGFYPSDIAVEWESNGQPENNYKTTPPVLDSDGSFFLYSRLTVDKSRWQEGNVFSCSVMHEALHNHYTQKSLSLSLGK

SEQ ID NO: 3518 - protein, 452 aa, synthetic construct
  REGION 1..452: note = Description of Artificial Sequence: Synthetic polypeptide
QVQLVQSGAEVKKPGASVKVSCKASGYTFTSYWMNWVRQAPGQGLEWMGRIDPYDSETHYAQKLQGRVTMTTDTSTSTAYMELRSLRSDDTAVYYCARGGYDFDVGTLYWFFDVWGQGTTVTVSSASTKGPSVFPLAPCSRSTSESTAALGCLVKDYFPEPVTVSWNSGALTSGVHTFPAVLQSSGLYSLSSVVTVPSSSLGTKTYTCNVDHKPSNTKVDKRVESKYGPPCPPCPAPEFLGGPSVFLFPPKPKDTLMISRTPEVTCVVVDVSQEDPEVQFNWYVDGVEVHNAKTKPREEQFNSTYRVVSVLTVLHQDWLNGKEYKCKVSNKGLPSSIEKTISKAKGQPREPQVYTLPPSQEEMTKNQVSLTCLVKGFYPSDIAVEWESNGQPENNYKTTPPVLDSDGSFFLYSRLTVDKSRWQEGNVFSCSVMHEALHNHYTQKSLSLSLGK

SEQ ID NO: 3519 - protein, 452 aa, synthetic construct
  REGION 1..452: note = Description of Artificial Sequence: Synthetic polypeptide
EVQLVQSGAEVKKPGESLRISCKGSGYSFTSYWMNWVRQMPGKGLEWMGRIDPYDSETHYSPSFQGHVTISADKSISTAYLQWSSLKASDTAMYYCARGGYDFDVGTLYWFFDVWGQGTTVTVSSASTKGPSVFPLAPCSRSTSESTAALGCLVKDYFPEPVTVSWNSGALTSGVHTFPAVLQSSGLYSLSSVVTVPSSSLGTKTYTCNVDHKPSNTKVDKRVESKYGPPCPPCPAPEFLGGPSVFLFPPKPKDTLMISRTPEVTCVVVDVSQEDPEVQFNWYVDGVEVHNAKTKPREEQFNSTYRVVSVLTVLHQDWLNGKEYKCKVSNKGLPSSIEKTISKAKGQPREPQVYTLPPSQEEMTKNQVSLTCLVKGFYPSDIAVEWESNGQPENNYKTTPPVLDSDGSFFLYSRLTVDKSRWQEGNVFSCSVMHEALHNHYTQKSLSLSLGK

SEQ ID NO: 3520 - protein, 452 aa, synthetic construct
  REGION 1..452: note = Description of Artificial Sequence: Synthetic polypeptide
EVQLVQSGAEVKKPGATVKISCKVSGYTFTSYWMNWVQQAPGKGLEWMGRIDPYDSETHYAEKFQGRVTITADTSTDTAYMELSSLRSEDTAVYYCATGGYDFDVGTLYWFFDVWGQGTTVTVSSASTKGPSVFPLAPCSRSTSESTAALGCLVKDYFPEPVTVSWNSGALTSGVHTFPAVLQSSGLYSLSSVVTVPSSSLGTKTYTCNVDHKPSNTKVDKRVESKYGPPCPPCPAPEFLGGPSVFLFPPKPKDTLMISRTPEVTCVVVDVSQEDPEVQFNWYVDGVEVHNAKTKPREEQFNSTYRVVSVLTVLHQDWLNGKEYKCKVSNKGLPSSIEKTISKAKGQPREPQVYTLPPSQEEMTKNQVSLTCLVKGFYPSDIAVEWESNGQPENNYKTTPPVLDSDGSFFLYSRLTVDKSRWQEGNVFSCSVMHEALHNHYTQKSLSLSLGK

SEQ ID NO: 3521 - protein, 452 aa, synthetic construct
  REGION 1..452: note = Description of Artificial Sequence: Synthetic polypeptide
QVQLVQSGAEVKKPGASVKVSCKASGYTFTSYWMNWVRQAPGQGLEWMGRIDPYDSETHYAQKFQGRVTMTRDTSTSTVYMELSSLRSEDTAVYYCARGGYDFDVGTLYWFFDVWGQGTTVTVSSASTKGPSVFPLAPCSRSTSESTAALGCLVKDYFPEPVTVSWNSGALTSGVHTFPAVLQSSGLYSLSSVVTVPSSSLGTKTYTCNVDHKPSNTKVDKRVESKYGPPCPPCPAPEFLGGPSVFLFPPKPKDTLMISRTPEVTCVVVDVSQEDPEVQFNWYVDGVEVHNAKTKPREEQFNSTYRVVSVLTVLHQDWLNGKEYKCKVSNKGLPSSIEKTISKAKGQPREPQVYTLPPSQEEMTKNQVSLTCLVKGFYPSDIAVEWESNGQPENNYKTTPPVLDSDGSFFLYSRLTVDKSRWQEGNVFSCSVMHEALHNHYTQKSLSLSLGK

SEQ ID NO: 3522 - protein, 213 aa, synthetic construct
  REGION 1..213: note = Description of Artificial Sequence: Synthetic polypeptide
DIQMTQSPSSLSASVGDRVTITCRASENIYSYLAWYQQKPGKAPKLLIYNAKTLAEGVPSRFSGSGSGTDFTLTISSLQPEDFATYYCQHHYGTPRTFGGGTKVEIKRTVAAPSVFIFPPSDEQLKSGTASVVCLLNNFYPREAKVQWKVDNALQSGNSQESVTEQDSKDSTYSLSSTLTLSKADYEKHKVYACEVTHQGLSSPVTKSFNRGE

SEQ ID NO: 3523 - protein, 448 aa, synthetic construct
  REGION 1..448: note = Description of Artificial Sequence: Synthetic polypeptide
EVQLVESGGGLVQPGGSLRLSCAASGFTFSDSWIHWVRQAPGKGLEWVAWISPYGGSTYYADSVKGRFTISADTSKNTAYLQMNSLRAEDTAVYYCARRHWPGGFDYWGQGTLVTVSSASTKGPSVFPLAPSSKSTSGGTAALGCLVKDYFPEPVTVSWNSGALTSGVHTFPAVLQSSGLYSLSSVVTVPSSSLGTQTYICNVNHKPSNTKVDKKVEPKSCDKTHTCPPCPAPELLGGPSVFLFPPKPKDTLMISRTPEVTCVVVDVSHEDPEVKFNWYVDGVEVHNAKTKPREEQYASTYRVVSVLTVLHQDWLNGKEYKCKVSNKALPAPIEKTISKAKGQPREPQVYTLPPSREEMTKNQVSLTCLVKGFYPSDIAVEWESNGQPENNYKTTPPVLDSDGSFFLYSKLTVDKSRWQQGNVFSCSVMHEALHNHYTQKSLSLSPGK

SEQ ID NO: 3524 - protein, 214 aa, synthetic construct
  REGION 1..214: note = Description of Artificial Sequence: Synthetic polypeptide
DIQMTQSPSSLSASVGDRVTITCRASQDVSTAVAWYQQKPGKAPKLLIYSASFLYSGVPSRFSGSGSGTDFTLTISSLQPEDFATYYCQQYLYHPATFGQGTKVEIKRTVAAPSVFIFPPSDEQLKSGTASVVCLLNNFYPREAKVQWKVDNALQSGNSQESVTEQDSKDSTYSLSSTLTLSKADYEKHKVYACEVTHQGLSSPVTKSFNRGEC

SEQ ID NO: 3525 - protein, 20 aa, synthetic construct
  REGION 1..20: note = Description of Artificial Sequence: Synthetic peptide
  VARIANT 1..20: note = SITE - This sequence may encompass 1-10 "Gly Ser" repeating units
GSGSGSGSGSGSGSGSGSGS

SEQ ID NO: 3526 - protein, 30 aa, synthetic construct
  REGION 1..30: note = Description of Artificial Sequence: Synthetic polypeptide
  VARIANT 1..30: note = SITE - This sequence may encompass 1-10 "Gly Gly Ser" repeating units
GGSGGSGGSGGSGGSGGSGGSGGSGGSGGS

SEQ ID NO: 3527 - protein, 40 aa, synthetic construct
  REGION 1..40: note = Description of Artificial Sequence: Synthetic polypeptide
  VARIANT 1..40: note = SITE - This sequence may encompass 1-10 "Gly Gly Gly Ser" repeating units
GGGSGGGSGGGSGGGSGGGSGGGSGGGSGGGSGGGSGGGS

SEQ ID NO: 3528 - protein, 40 aa, synthetic construct
  REGION 1..40: note = Description of Artificial Sequence: Synthetic polypeptide
  VARIANT 1..40: note = SITE - This sequence may encompass 1-10 "Gly Gly Ser Gly" repeating units
GGSGGGSGGGSGGGSGGGSGGGSGGGSGGGSGGGSGGGSG

SEQ ID NO: 3529 - protein, 107 aa, synthetic construct
  REGION 1..107: note = Description of Artificial Sequence: Synthetic polypeptide
DIVMTQSPSSLSASVGDGVTITCQASQDIYNYLNWYQQKPGKAPKLLIYAASSLQSGVPSRFSGSGSGTDFTLTISSLQPEDFATYYCQQANSFPPTFGQGTKLEIK
